United States Patent Application Publication US 2024/0110199 A1 - sequence listing, part 3

SEQ ID NO: 1 - DNA, 7202153 bp, Glycine tomentella (residues 3,601,079-5,401,617 of 7,202,153)
aacttttagaaaattggccaagataattcaaaatgaaaaatcttgaaatattgtttcaattagaagtgatcatggtggagaattccaaaatgaacattttgaaaagttttgtgaagaatttggaataaatcacaatttttcagctccaagaacaccccaacaaagtggtgctatggagaggaataatagatcacttgaggaagatgcaagaacacttctaaatgaaacaaacttgcctaagcatttttgggcagatgttgtaagtacagtttgctatactttgaataacattctcataaggcccattttgaagaaaaccccttatgaactatacaaaggaagggaaccaaatatatctcattttagagcttttggctacaggtgtttccttgatcttctcacatcatcagtaccttcatgtgtaacttcaagtagttcccacatttctttgacacttttacacctaacagtcctgaaaaattcatccgaaaataatgcagaagttatcatattctttgccttgaaatcatattgaaccattttcttttctattttagacatttcatcccattcttttggtattgaattgcgatcaacaatcttggtaggaatgaaaggacctttctcaatacaattccaagcacccgggtcattcgattggatgaagatttgcatcctatttttccaaaagttaaaatgttctccttcaaacaaaagtggtatattcaatgaggctccctccttgaatgttatttgattagtattcattttcaaatatttttagaaagatcttgagcaaattacaagaaccagctctgatgccaattgaaaatataatgaatacttatgcaaataaccaagagggggggtgaattggttttatatcagagttttaaaattttctttcaaaatttataacagcagaagactttcaaaaggatcttgatctttcaaaaccaatttgaaaatcaatttacctgaccaatcaaaccactcttgtgatgtaaccagatttgtataatgaacaaattctttacttcaagaatataatgaaatacaaacaaaatcttaaaacacacaagatttatactagttcacctctgaatcccggaggctacatccagttttattctaaccaaatcttggtcagagttccactataacaaatatttgttctttacaagcttacaattgatctctcttacccaccctaggtaaaattcaaaatctataccctatacacttttcaaaagaccaagaaccagagatcccctctctgttcttcccactagaaaatctttctagtaaaaactttaaagaatacaaatgttatatggaaatacaacacaaaacaaaatagatatctgatagagtgcttttagttaaatttttgtctatcattcttagcttatttgaattctcttggacctttattttcctattctaattcagtttttgtcttaggtaagtaagtggacttaattgctaattgttgcgtatttttagatttttgctcacttcatatatctaacttgtataggacctatagagtgctacagaactccgaatggagagttctaggggtccctagaaagataacgaaaagatatacaagttttatagaaatagcctaaggccaattctgtcatttggatggtcattttaagcttcaaagttagcacctctgcacttgtaattttgggctttgaattggacttttagtggttgtaaatagtagataattagaattgatgggtcatggcccattattttcttcagatttagtcactacatattagtgacgttggacagattttacaacactttacattacattccatttaataaaaacagttttacaatttctctctttaagttttaggatcaaaaccgttgttcttcattttctctcaattgttcttcatcttcttcattttcatcttgctatccttctatttactgcactcatttcatggggctttccatggtgatgatcatggaaagctaaatcatcaatcaatccaaggatccaactcaagtaagagaagaattggagttccagtttggtattttgaattctatttgaatgttcaccttcttctccaatttttattatgttttcatgattatgaatgcaattaggattgaaaacgagttagaattatggattcatgtcctaatttcgaatgataatcacaagattaattgaatgatattttagttagggttgtggtttcaattaatttaggagtagagtcgatagaactgcttctattgagattgaacgaatgttcatgatagaatcaatttatgagaatgatgatgattcgaatagcttaatttggtgaattggattgatgatctttaatctgttttactttactcactactagaaaagcagctttcaacatcagttatatgagacatttaacatcggttctcgcccgatgttgaatcaggcgatgttgaaagttgagaatttaacatcggttctgaaatcgatgttaacaaacgtaaagcacatcggtttgccatcaataactgatgtgaacatgtcatacatgaaaacgctcaaaagaataaacgatggtatgacaacatcggttttgttataaaatcgatgttaacatataaatcaacatcggttttcactgacacccgatgttgttatcacgaaacaacatcggttttgtaaactaaaccgatgttgttacaaaaccgatgttgtttcgttataacatcggttttcattgaaaaccgatgttgatttatatgttaacatcggttttatttgcaatcgatgttgtttttttattttatttttaaatattttatctgtttttttaattttaacagttcttcaacctgcaaatttaaatatccagaaccagcaatgcacaatttaataatattccaataacaaatccaatgtaaagtgtcaatgtacataaaaaatatgctaaactttaatatatatatatatatatatatatacacaattgttttgaaaaatagaaatgaaccccctaatctactaatacatcttgtccaattttaagaaaaaaatttcgcccattggagtctgattgccttcatggtgtccgcttccaatggtctttgatcattaaaaaactgcatgacataacaaaacatgtaataagtacaaaacaaaaacaagtaaaccaaaacaatttgttttgaattagacaagtaattaccatgtcccagctatctgtgaaggctccctggactattgtctgcatccaatgcatgacataatagccacactcagtgcttcctgtttgcttattacactaaattgaaaaacaaagtcaaagttaaatgccaaatatcgtgaacattaataaaaattaattgaatacttaaaccatgatttatgaaaagacttactttaagcgcaatccatttagttgtagcctttgatttacttgctggtgtaacgacctaaatttctacttattctttattaattttattcttacttaaagataaatgttctaaaaaaaacgaataatagtaaagattttaaagtgtaaaatttgcaaaggatttgctactcgtatacatagccaatgtctctgatacaaaagtttagataatacaagtacactactttctcaaaatccagcttattacataatttcgtttatatttcttcactactccaaggcttcacggaacctgtccatcattgccatctaaaaaaaaataaaacaattcgggtgagaaataaatttctcagtaggcaaagctaaatcccgaccctattattaggttagtaaaatcataaaaaatcaaacacataaacaagcaatatgcaaactatatgaatgcatgagatgaactatcccagggcaaatggctcccacatatcatactgtatgtggccacgctgagcgtggtcgctgctatagtcttacgcaaacatgcatgaattttgccataaatccttgcccatgggtactacatatcatactgtatgtagcattagattttgtttccccaaagcctcgtactggacttggaacatggaaacatgaatccacctatcttaatcacataaatcatccatatgaaaaatcaaatgcataagtaaaacacagatcatatcatcatatatatcataagtatggttacaccaccatattttatccactaagcttttataagtatggttacaccaccataccttaattaagtaagattattaccaaacttatgcataaccagagaataaccttaactacagaaaaattatgttagtagtctaactaataatcctcaatataaataatatctaattctttcaaacctttacaagcaaagttcacatctagtatacatcttaattctcctttcacctaccaccacactaattaatcctcaaactcaaatcatcaagtatttaaaccattcaactccacaccattcatcctcttcttcaaaaattaaatcaaaacatgtccataaaaatataaacagacagtccaaagtatcattaaaatcacatcaaaagatcatcaaatagacttccatacttcactaatattgatgggtataaatcataacctatcttatgaattaattcaacatattctcatcaaagaatatccttcaaatagcacgaaattcaagcctaaataacaaccataatttagcatgtaagttaatccaactcattgattaactagagattcaacttcacctacctcaagggagtttgaaccttggaattgaatggatagatggcttccttccttccttccttccttggaaaatcctcttagagaggaagccttgatatccttctacaagcttgacaagaactcttcctaaggttgctaggtttctcacgaaaattttttcaaagtgatgggtttgtttttcttacttgattcaagctttataagagaaagatgaaatgaagatggtgtagggagagagtggtcatgtgaatgagggtagcagaatgccttgagaatggcttgtgttttaggtccaccacctccctttatatagtggtttaggattcactttgtggaaaaatatctcctataccataatggcttatctttccacttgtccacccctttacaagtgtccctacacttgtccaaatcataaaggctcttaattctccatcatccaagtgtccaagctcttgaagtttctccatttctcttgcattttcgtggagtggctagattttaagaagatttcgtgtttttcctttaccccaaaacccattttagtaaaatagtgattctggattcgttaactgtgggatctctttaaaattttaagggcacactactatctcacatatataaattttgaccgttgggattgttgaaataatgtctagagatgtccacgtgcaagatggaagagtgtagagaaatcttggcttgatttttatgttaccttgcatccataccatacaagtgtcatgccacttgtttctatcatgtggcttgctttccaagtggtttatcatgaagtttcttgcctcttctacatgttttctcacatgaaggaccaatctaaagggaatgaataccaatttttcttcctttcatgccacatgtggtcatttttttattatgaataaaaatctagtttcaatatggcattttcttaaaaataaatccaatttaatttgaattcttttatctaaataaaattttgaatattagaattctagatgttcctaagaatttatcccaatgatagtttaaattaatcccaaacagtcttatacagggcaatacataatcctttcattctagactgcatctttatcttgattttgattgggctatacttcttctgaccatcaaaattactaaaccattttattaaataggtctattcatcctataattaagagaaaattctatagatttcatgtatcatttttccatatttttctgatgcttgagttttcttgaataaagcctcaaagttgtcatcttctaaaatttgtagaaattttattctacagttttgtgtcacaaaatttgttgatacttagtcagctaagtgtattctataatttcatcaagtttctacaaaatttctaaagttatttgagcatttttggcctaggggcattttggtaattatgccattcaacctaggggtattttggtcattttcaaaaatgtccaagggcatttttttgtaattttcatcttaagggttttctagtaatttccacttcatggagagagtgatatagttatttttctctaaacatacttgtattcaattatcatcacatttttagaattttggggatgttacaactggagagtgatccaaacccttcaaagcactatttaagacaaacaagtatgcatactgttcaagttagatttcaagtatagaaataacgtaaatgtgttagaaattagaacctacctgttaataattcctttaaggtagttgtcaggcctgttatgcaatgaacagaaccagacgactacattggccttcggacatataactaccagttgccaatgtgaactgcattgtaaaaaacaaggttattatattgcatacattaataaattgtgattctcatttatgcttacccattcaaatacggtgcaatgtagacttttttctatgaagtctgcatccatttcttcatatagtcctcgatcagaaattgagattggccagatctctgtatcgattatggctcgaggaatccatagacatcggggtgatcggattgcagacttaaatgattcatatgccaattatgcagtgaaaataaagtaatttatggtagaatataaaacaattcaccaaataatgctagtcaattgcaagagacttacaacatccacaactgtaaaacggagatgttgagacactgaccaccatggatgatctccgaaatatccttatgcttgatgtacaaggggaagttttcattaactacccctaacatctacgggtcccatggcacctggaagggtctgaggaaaagatcagggatggtcaaggctagaaggtacaagggatcataagcacattccgccttatctataggtttcgctggtcccttggcttcttgtttatcctacatagttaacaaccaagggtgagcgatcatgttaagttcatatgtgagaaatcattcttaaagtagaagacataagggaaaaataacaaaacctgtcaaaattgtctgtacaagatgtgtgggccaggcaaggaaagtgttaagtgcctgctgtaacaccccggacgtgttatcattaataatatcacaagcgcgctatcagcgttatctgaacgcagtgcggaagcgatagaatcgattttcttgattacattatgcatggaatataaaacacacatcaaacatcaataccaagcccctgagatccagttaactcaaacatagaaatataggcagatacaaaaactcagaaaactaaacagagatatcaggaggaaacataaactcatacacataacatcacctgtacatatatatacaactcataagttctaccacatctgtggttatacaacataaatatgtacagacaacggttgtacactcacaccctatacttatacagaaatacaagacagagatcaaaagaaagagactcttctagtcttcatatgcagcccaggaccactccagcactctcggctagggcctcctgtcctgtggtaacttctctcctctagaagtacctgaaaaaccacaaaccccacacagggtgagacaaacgtctcagtaagctcagggttctgggagatcttcccttaccctggttcacccccaagccaaaacataaacaacatgacacagcctaggacattatcctggctatcacacgttacccagttctctgggtactatctagatgctctcagcatcagaggtctcccacctcatactggctctcaagccatctcagatcagtctcacagaggtaccataacagagtgtccaccataggacacttcacatatcagagaggcatcgcctcatcactgaacaaacattgcctgagttaccttctcaggacttcacacgcatacattgcctgaggaatctctccactcaggacttcaagaatccaaatatggctcatctaagaggctctaggctctcatcccctcgggaagccctctcttagagatacaacatatctgtctactgcctggcctcaccaggaccttcataacacatgcctgggcaagaacatccataaatgggcaatcacctccaggactttccacaacacgtgcctgagagagatcatcccacaccgggggcactccatccctcaggactttcctctgcctaggagagatcatctcacgacggaggtactctatcccctaggactttccaatccaacgcctgagagggatcatctcacacctgaggcactcaacccctcagggcttcacatcacatgcctgagagagatcatctcacacaggaggcactcaatccctcaggactctccactgcctaggagagatcatctcacaacggaggcactcaatcccccaggacttcccatcagctgcctgagagagatcatctcacacaggaggcactcatccctcaggacttccaagtcacatgcccgagagagatcatctcacaccggaggcactcaatccctcgggacttccagtccactgcctgaaagagatcatcccacaccgggggcactcatctctcaggacttcacagcactagcctgggaaaaccctccaggcttatcaatatctctgcctaaggaggaacatccttacagggcagtccaaccttaggacttaaggcggagagcagtggcacctcccaaggaatctcaactattccagggagtcctcaaactcttcctctggcttgggaacctcaactagcccgatactattccaatatcctatagattccatcacttgcaatctcaggtgcatcatcaccctcacactatctcagtgtctatcctagggttcatcatacattcacatttctggaacggtctgagtatcactccaagtaccgttcatctagcctttcaggctttaacacacataatcatcaagataggccacttaggcctttcattccacagcatgcccataaacaaatacaaaacaagcatggcatgcatcaatcacccacttcggtggtaaacgagagaaagggactaattcccagagcgatgagcttacctgatagcagtgcctgcaacaccagcttcttgaacaatggtctgctcctctgacacctcgtgtcaagccctatcaaggcaaccaaccacatatcacagactattcaagcagatatacataactagctcatcgagcagtcctcaactgcctcagagaaaggaacctcaatcctttctatcaacccaggtcatctacctaaggttcattaggctcctctatcacaggcctgtccatagaccctcagtagtctatctcagctcaaccatggcctcagagtcatcctagactcacaactagccattcacaaggagcttagagttcagacaacccaaaacctcagggttcccacagggcttggacggtctatctcacaacacaccgtccccatggcctcacaggcaccacaagcccatcagtttggctcttgcatgtctcaaatcaagtgactcagtccaagtcacacatgcatatcctagagccaaaacaaacgttcaccaaatcacaactgaaagctaatccttcctcctcacatgtttctaaacacatctctcaacgggacccagagctaattctagctctatcacagatgggtcactattcacaggaaaaccccaaatccaaaatcaatcagagaagctcgagtttcttacctcagaatcgatgaggaaggcctctgggctgctctcccgagccctggtgtcgctgaaccaccgtcgttcctcacccaagctcgagttctctacaacctctctcagaggatgagttctttggggtttcaagggaaatggaggaaggattctcgttctcacttggtttctagggggtataacgggttaaggaagcatttaggctcataaagcaaggtcatgggagcttgggaagctctcccatggctgctggagctctgaggaagaaataccatttcttctcctcccaaaacgctatccgcgccaggtacagaactgtggcgccatcagcgccgctcctggcgctgtccgaatggaaatccagaggatttaggctttccagggcactactggcgctacccgcgccaacctctcgacttatccacgccactagcgccatcatcgcgccatcagcgtgaactggccgaacctctggcgccatcagcgccaaagccaatgagtctgacgctatcagcgccaaccctagcgctaaccgcgccacaccctctacagggttttctgctgaaggatcccggcgctatcagcacgagatctggtgccacccgtgccatagtgagggtccttacacctgccccactaacacaacctcgtcagtgggaacagggacgggagcgtctgcatcgtgaacctcctcaacactcacctttacctgaccatcggcaagagggacactgtgaacagtcgtcgatccctcatgaactctgccaagggcaacaaggcggggaggattgccatcaacatacaacccacgcctgtcagatgcacccgtgtcaaggtcattgcccgagggatcgacacgacttcccttggtgctgacacgggcattaaggggacatgattgtacctccggaggctgaatggctgcctgagactggatgtgggactgtgatcgaggtcgtactcagtcaaattaatacaattaaatgcagtactaggaagtgactcctaggtcgtctctctaggatcaattgtctgtgttaagggattaaacgtataatgggggggattctaacagaatgcaagagtatataaaataaaatagaaataccaaataattgcagtgattaaacaagtcagacctttgaacagattgcgcctctaatatcctcggttcacgaaagataatctatcctaacttaatccttgttagtccagattaatctactaagcgaagattaacctagaacttccgtacacgaattaagcaaacgcgaacctcgtcaggcctaatctctcatgattaagcaacctgagattactgaatcaaccaactcagaatcattaagcatgactctaattcgaaaagatacagaacagagacccaacaaggaagaaacaagcagaacaaaattacaagtacagagaacctccattaatggtttgcaatctgttctagggtccaaccataagatttagccttccattaattcgaaaattgcaacagaaacacgaattgaataacagtcgaacattaaacgaaactagaagagaaacgaaattcaaatgtaaaaatgaaacttaacaaaaacgaaaaccaaaatactgaaagcagaaaacgagattagacactagaagcagaaacgaaataagcactgaaattgaaacgcaaccgtattccgaaacagaaaatccaaacaaaaacgaaaaccctaagcagaataaccaacagcgacgaaaaccctaaaaccctaaagaaactgagcgtgaattattattctttttttgcatgggcacagtattctataaatactagtgtctgacctaaaagaaaatgggcctttcctaacaattttggcccaaaaaatcactaaagcaaaataaaacgaaaataaaatgctgatgtggaaaatgatgctgacgtggcactccaatcttcaagtccatgaattaattccaagcccatttaattattaaactgccctgaaaataaaaattggaataattaaactaaaaaatccaaattagttaaaatctgaattatcggtccaattaaatcctaaatgagaaacagtgctgaatataaacgattaaacacaaatcagggattaaaatgagtacagaaaggtgagaaaataaaggtaaataatgactcatcaaatccccccacacttagccttttgcactcctaggcaaaatccaaaaatagagcaaggaacaattctaaagacattaaagaaagtgacacaccgaaaaataaacagttacgcacaattctcaatgaaaactgggaaaagagaaaggaattgacaatttccaacacacaaagagtcagagaaactacacacttatgggatttatccaagcattcaaaacttagcaaaacaatcaatcagctcaagaggtgaattaaaagcaacagaacctcaccagatgcactgtatcacactgtatctctcaagtgattaggcaattgtatatctcaaaacactcatgaaaacaagcagcagatagacttggtgagtctctataatcaacacccaataaacatgcatataaggatcaaaaggtcttttcagggttgtaatgtggtcaaggacatggtagaggataaaatatgggataagtagctgcaaaccagaggaactaaaggagcaatggggaataagtaagaagtgggcacaagagcaaacccaaaaatctctaataagcctctaacaccattccttttcctttgcttcaaacacaacaacttttctttaagtacttattttcaaacaaaccagaggtttttttttttttttttgaaacttaaatatggtactgagataacacaatgcatagaaacatgaagaataagctgaacatcagagtaaaccaacaggccagatgcatgcacccccgcacttattcccaaaacaattccaaagctccaaagttccctaaggttaaggtaataattgtttttcacttaaggcttgtaatgggcttcaaacaatagaaagggaattaggctcaacagggttatcaaaggaattaatttcagggtaagcttatttggccagaggcttatcaaaacaagagtgccttaatcatatccaaacatgcatgagaaccaagaaatatcaaacagagtcaagacaagacaactgtgcaagcaatcaagaggcatagaacacatgaaagaacagatagtggctcaaatcctcacacagggtatatctgtcacaattaaatcaacctttcaaacttcataatcatctttccaagtagagaaaaatatggattccaaaccatatagtatgaaacagctcttatataagagtgaagtaagtgctgacacctattcaaaacccagaaatcaaaaagaaacatgcaaaactatacgcaagataagaattaaaactaacaacacaagataataagaattaaaactaacaaaaaaaaaaacagtttctcccccccacacttaaattacacattgtccccaatgtagcacaaacaaaagttcagagcaatcagaataatgcaataaatatggacaagtgcgataaaaataaaggaggagaaagaaaaagaaaactccctaaggtgtagtggaagatggaagggaggcagggtcaagcaaagacatctccataactgcatcaagcaaggaaggattgctgaggaatggtttaagacggtgtccattgatcttgaagctcttgcctgtggactcactttggatttcaactgtaccataaggataaacattagtaacaacaaaaggtccaatccactttgaccgtaacttaccaccaataagtccgagcctagaattgtacaagagaactttctggccaacctcgaagtctttcctagctatcaggctattatggaacttcttggtcttctctttgtagaaccttgagttctcataagcttgaaggcggatctcatctagttcacttagctgcaacttcctttcctcaccagcttgatccatggaaaagttgcaggtcttcacagcccaataggctcggtgctcaatctcaacaggcagatgacatgccttgccaaagacaactcgataaggagacattcctatgggcgctttgtaggcagtcctatgcgcccaaagagcatcgtccaatcttatactccaatcctttctgttgggctggacaactttctctaagatcctcttgatttctcggtttgaaatttcagcttgcccattagtttgggggtggtatggtgtagagactcgatgcacaaccccatatttcttgagcaacgcctgcatggatctattgcaaaaatgggtgccttgatcactaatgatggctctgggtattccaaacctgcaaaatatgttagatcgaacgaaatctgcaacaacccgagcgtcattagtcctagtagctctggcttctacccattttcaaacataatcaacagctaaaagaatgtaggaaaaatcaaaagagacaggaaagaggcccatgaaatcaataccccagacatcaaacacctcacagaatagcatgggttgctgaggcatctgttgtctccatgtaagggatcctcttgctctctgacactgctcacaagtgctacaggtcttcgccgcatctctgaagatggtaggccagtaaaaaccacaatcaagaaccttgcgagctgtcctctgtataccgagatggccacctggtgcggaagaatgacagaactgcaagaccaaattaatctcaagatctggtatgcatctcctaatcacctggtcactgcacaacttccacaaataggggtcatcccaaatataatgcttagcatcactcttaagtttatcaatttgagctcgtgatgccaagggaggaaaaacagaagcaactagataattcacaatgttggcaaaccaaggggtggggttagaaacagaaacagaagaaacaattaaaaggttttcatcaggaaaattatcctggatgggcaacacctcagcattatttttagctctttcaattctgctgagatggtctgctaccaaattctgagctccactccggtcacggatatccaaatcaaattcttggagcaagagcatccatctgatcagtctaggctttgagtcagtctttttcaacaggtactttagagctgcatggtcagtatagacaataacaagagaaccaagcaaatatgatctaaatttatcaaaagcaaacacaatggcaagaagctctttctcggtggtggtgtagtttgcttgggcagcatccaaagtcttggaagcataatatatcaccctaggcagcttatcaactctctgtgccaggacagcccccaatgcataattagatgcatcacacatcaattcaaacgggactgtccagtcaggtgcctggaggataggagtagtagtcaatgcttccttaaggtgatcgaacgccttcttacaactatcatcaaaaataaaatatacatctttttgcagcagattggatagcggaagggccttcttgcttaaatctctgataaagcgcctgtagaaccctgcatggcctaggaaagaacgaacctctcgctcgcaagaggagtaaggcagatgtgaaataacaaatacttttgcaggatctacctctatgcccttactagaaatgatatgccctaaaactattccctgttctaccatgaaatgacatttctcaaaattcaaaacaaggttagtttcaatgcatctattaagcactttatccaaactatctaaacatatgtcaaaagaagatccatacacagtaaaatcgtccataaacacctctatgcaattttcaagaaaatcagaaaatatactaagcatgcaccgctgaaaggtaccaggggcgttacataggccaaaaggtatcctcctataggcaaaagtgccaaaggggcaggtgattgcggttttctcctgatcctcaagagcaatatggatttgaaaataaccagaaaaaccatcaaggaaacagtaatgagatttacctgccagacgctcaagcatctggtcaatgaatggcagcggaaaatgatctttccgtgttgcttggttcagccttcggtaatcgatgcagactgtccaactgttttgcactctggttgggataagctcatccctgtcattctttacaacagtgaggcctgtcttctttgggaccacctggactggactcacccactgactgtcagagataggataaatgatctcagcctgaagaagcttggtcacctccttcttcactacatccagaattaccgggttgagtctcctctgtggctgtctcacgggtttagatccgtcatccaatggtattctgtgcatgcaagtggatgggctaataccagatatatctgtcagggtctatccgatggcttttttgtgctttttcagaacatgcaacagcttgtcctcttgaacagcatcaaggaaagtggaaatgatcactggcaacctctcatcactctccaagtaggcatacttgaggtttttcggtaagggttttaattctggaatgtgggtaggttaatcaggaaccagggatggaagaagaatgggttccacagcttgtacctcaacctgtaagtcagacttttgtgtacttcctgaaacatggttagtgcattctgactctaaagaatttatatctagaggtacaacacccaatacatcagaattaatctcagaacaggcatcaaaatgggacagaggttcagattgaaaatcaaagttagtatcattgtcggattcatattcagattcagaatagaaatcagaaatatactcatcaacaacatcatcaagaatctcagcacggaaaacagaatgattttcagatggatgtttcatggcatcaagaatgttaaaatggacaacaatatcaccaaattccatagataatgtaccagcatacacatcaatcttagttcgggctgttttcaaaaatggcctgcctaaaatgagtggaacagaaccatgggagaatccctcctccatatgaagcacatagaaatcagcaggaaaaatcagttcaccgacccgaactaagacatcctcaatgaaatctgtaaggtgggcaacacttctatttgccaactgtatcaccacacccgtaggttgcaaaggaccaagagacttagatttaaaaatggacagaggcatgacatttatagaagcacctaaatcaagcatggctttgtcaaatttactattaccaataacacagggtatgcagaaagtacctgggtcctcacatttttcaggcatgtgtggaacagatttgcctgtcatagaggacacatttctacccatgctgactctctcaattcccgtcatcttcctcttcctcttattagtgcacagctccttcaagaattttgcatattttgggatgtgcttgatggcatcgagcagaggtatgttgacttctactctcttgaagatctccaatatttccttatccacctcttccatctttttgtttggaatcgatctaggaggaaatggaagagggatggaaagctgctgctgcacatcagaactggtgctagaagaaggtccacctgcatgaatttttcgagtaccaattggatcatcattttgctcatgtattggtacaggaactggtattgatgaaggtggggacactgcagtaggtatgtcaatctattttcccgacctcaatgtgatggcactcacatttttcagattctgcacagtctgagaaggtagtctatctgaattttgtgactgtgcctgattaagttgagtagccatctgccccatctgattagttagactctggatggaagctctggtctcttgctggaattgcaaattttgaagagtcatctgtctcactagctcctccagtgaaggttcaaaagtagaagattgaggggtcggtggtgcaggtgcatcatgttgttgcctctggtactgctgctggactggtggaggtacataaggtctggttggaccagcagaaccttgaaatggtggtagtggaggctgatgctgttgatgctgcgaagtgtttgaccatctgagattaggatgatttctccaccctggattatacctgttactggacagatagtaattcgtctgctgttgttgaggtctattgttatagatgtttgcagaataagcttgaggagcatcagggccaacatgttgctgcagagagggacatgcatcagtataatgatcattggaagtgcagataccacaaactttggcaacagaggccgacttttggttaacatcaagtttagtcactaaattaaccaaagcatctagtttgccctctgttgtgaacaaacgcaatggcaagtgcaccgatcgtttacaagtaataaagttaggtaagtagagtatcgttctccacagggattggggtgattccatagtaatactaacaattgtgattgaaagtaaacacagtaaagttgagagaaaatgtttgattggtggtattaaaacagaaaattaaaagaaaacagtaagcaattgaaaagattaacaagtgaatgacaattgtggtcaggcacaattccttctgagtcttacctctttcacttgactggactgttactttaaagttcacatatgataaatctctcctttagttgttaatcctagataactagcgattactccctttaatttgatcgagaaccctaaacccttagcgattctgtcaaactaagcattaagagaataaatcatataggttcgtgttatgattgctcggagaataagtcttttctatattagttaatccctaattccttagtgaatcaaccctttcaactgaattgaaaacctaattcgttagtgaaatatatcagttcaagcaattaaagaacatattataaactccgcacttacgcatccctattcctaggtgataaataaatgttattcttaacaggtcagaaattagaaccccaacgttcccattgcgaatcctaaccctcaatacttatctagagtgatcaattctaaacaagatgaaatacaaattagaaaagaattaaaacaatcaaaacatatgcattcaataccagtcaaattacagaggataactcatcagttcatggccttcccacaatacaagaattagcccgccataggcctcaagaacaccaaagcagatgaataagacatgattatgcagaactctggctttgaatcttgatttctagggtttgtaatagctaaaactatgtttttcaatctctaaccactctcctttagctttgttcagaggcctcatatatatagaagtgtttaattacagcaactaatcctaatacagtgccaaatctcgaagaaatataatttaaataaggaaacaagatcgagttcatgcgatccgcgcagtatccacgccaacaacgtggattgttcgaaagagtggcgctactcgcgtgagtcatggcgctagtggcgcggatccgacgctagtggcgccattcttacggctatttcacgctgaccgcgtggtatccacgccaaccgcgtggatctttcgagtctgaagtcttctatcctgcacttggcgccactcgcgtgggttatagcgcgatccgtgcgggatttgcatttttgttttcttcttttctttgcttaagtttcctctttttggcctgcatctgctcaattggtattgaattttgcttaagacaattaaaatactaaacttaactaattctattctattttcctacatatttaattaattaataacctaaaactacgctaaaactatgatgtgtttgcaacacatcaccctctaacttcgttgctgcagatgaagaagaattagcagctacatcatgaactcccctaataacaatggcatcattccttgcactgaactgctgggagttagaagccatcttttctatcaagtgcctagcttttgcaggagtcatatcaccaagtgctccaccactagcagcatcaatcatactcctctccatgctgttaaggccttcataaaaatactggagaaggagctgctcagaaatctgatggtgtggacagcttgcacacaactttttgaatctctcccagtactcatacaagctttctccagcaagctgcctgattctagaaatatcctttctgatggtcgtggtcctagatgcagggaaaaatttctccagaaacattctcttaagatcatcccaaccagtgatggacctgggagcaaggtaatacaaccagtcctttgccactcctccaatgaatgtggaaatgcctttaagaaaatgtgatcttcagggacatcgagaggtttcattgtggaacagactatatggaattccttcagatgcttatgtggacattctcctgcatgaccatgaaacttaggcagcaaatgtattagtccagtcttaagaacatatggaacatcctcatcagggtactgaatgcacaagctttcataggtaaaatcaggtgcagccagctccctaagggtcctctcacgaggtggaggttgagccatattgttctcaatattaatatgatcagcagaatcagaaatggtatgcacagaattaaagttggtggaggcagaaggagaatgctcagaattcaagctaacactatctactggtacagaatctaatgaaaaatgcctagaatgcctaactaatctgtggtaggtcctgtctatctcaggatcaaagggttgtgagtctcttggattgcctctagtcatgcactatatacaacataacaagcatttggcagacaaacataaagagacgtaaaactagagctatactcaaacgaagtccaagtgagctgaaattttgtgagcagcaccctaaaatcatgaaaagacagcacaccaaatttcaaagccaaattcaaaggataaatatataaaccagattaagaaagtttagaaaaatagggaaataaaacatcaaaaataaaaataaaatagaaaacggcctttttctgggatggctagatcttttttttttataccccaaaagcatataaaatatgtccaattctgacggtcggatcaaaagttatgataatttgaagttgtcgcaaaaattggcttcccaaattttttcatttcagaatctggactactttaggtgattttggtattttttcgcacaaatataggccaaaagaagttatcacacaaaatttcaagcaaaaataacaagtctagctatcaaaaccaaaaatcacaattaattcaaaaaaactaggtactgttcattactgttcctacatgctgttctctggtatccacgaattgcttgctgaatacactaattggacctgcagaattgatcagcgcaaccaaatatgcaagaaacaaaaagcttgaagcacaattatagcaagccacaccccttaaaaacacgaactgatataggaaacaagccacaaattcaagttactgtttcattggttatcagggtgaaattttccagctcaactcgaatgctaccttgcttcctctaccacttgcaacaatgaacaataataacagaacataaagcagaataacacaaaaaaatagaacacacacacacaccagaaccctttcacagaactgatgatccccggcaacggcgccaaaatttgatcgaggtcgtactcagtcaaattaatacaattaaatgcaatactaggaagtgactcctaggtcgtctctctaggatcaattgtctgtgttaagggattaaacgtgtaatgggggggattctaacagaatgcaagagtatataaaataaaacagaaataccaaataattgcagtgattaaacaagtcagacctttgaacagattgtgcctctaatatcctcggttcacgaaagataatctatcctaacctaatccttgttagtccagattaatctactaagcgaagattaacctaaaacttccctacacgaattaatgtcaggcttaatctctcaagattaagcaacctgagattactgaatcaaccaactcagaatcattaagcatgactctaattcgaaaagatacagaacagagacccaacaaggaagaaccaagcagaacagaattacaagtacagagaacctccattaaaggtttgcaatctgtcctagggtccaaccctaagatttagccttccattaattcgaaaattgcaacagaaacacgaattgaataacagtcgaacattaaacgaaactagaagagaaacgaaattcaaatgtaaaaacgaaacttaacaaaaacgaaaaccaaaatactgaaagcagaaatgaaataagcattgaattgaaacgcaaccgtattccgaaacagaaaatccaaacaaaaacgaaaaccctaagcagaataaccaacaacgacgaaaaccctaaaaccctaaagaaactgagcgtgaattattattctttttttgcatgggcacagtattctataaatactagtgtctgacctaaaagaaaatgggcctttcctaacaattttggccgaaaaaatcactaaagcaaaataaaacgaaaataaaatgccgatgtggaaaatgatgctgacgtggcactccaatctttaggtccatgaattaattccaagctcatttaattattaaactgccctgaaaataaaaattggaataattaaactaaaaaatccaaattagttaaaatctgaattatcggtccaattaaatcctaaataaaaaacaatgcgaatataaacgattaaacacaaatcaaggattaaaatgagtacagaaaggtgagaaaataaaggtaaatagtgactcatcagactgcagctggctgaagctcatcatcacctgctgggtgactctctctgtgatcgactgtgtaagtcgatcagtgatagactgctccagctcgaccctgatgttgtctttcaggcgatccaagtcttcaggcgtcatggatgaagacctcgacttccgagaggatgatggagttggtccgaagtactgggtgatggtcacaccaactccagcaccacggacacgtccagggtgctccggtcgtccaatggaagccgccaggacatcctgacgaccactggcgacaaaagaaccctgggtggattgctcttccagggaatcctgcaattcgtaaagtagatcatttgtgttgttagttgtgataccaaaaataactaaatgtctatgccatttgtattgttttacttacaatcctttcagcaatctggcgtgccacctccgaagtcatgtcgccggttttcttcgtgcgagccagcttccacttcacgtgtcgtcgcacgggggacggagtatgaatgatcgtctccgtgctgtcatcacgagttgctccctctagttgcttcttttgtttttcctcgatcaatctcttctcgagcaagtcgtaacccccgcgtgacaatacgtgaggggcagtgttttgcttctggattgcctgggccttctttctcacatcctgtaacagtttgacaaatagagttagcaaataaaagactgtatgactacataattgaaaaaagacagggttatgtaaaaccactaaccatcttttcacacaatgtttcacaaaggtgaaaatttaatcctatccatcagacgaagccaacaatgactcaagtagtcacattgtaagatgtccacttaaaatgttacaacttagtttatatagagataggtatgaatcaatactatcatgctttcatctagcttctactcttacgttacatatatacaaagaactaaagggcacttgaaattatctttcatttcagccaaaaatatgaagatgaggaaatcaagcaatagtgagtgttcctaaatcattctaccaagtgaaccattaatggctatagaatgaacgactacaatataaatatgtagggaaaagacctccccatgcataaatactaactaccaccccatccgaccatgcacatatgcatatgtaacagaaatagaaaccgctaacctcccaggaagctgctcgcctactcagacagaattgagtccactgttcgtgactgatgccgtatttttcgcatacatcgtcggcaacgtccgcgttcccttctgcgaggacctatttccttgtcaagtcggatttgaactgcctctagcgctcgcccactgtctacagtatcttcttctttgtcctttcgtctgaggtttcaggtatatcaaattcagcctgcattagaacgaagttagttttcaaattacatgaataacaatttatttgtgtaatgctttaaattgtcatacctaaatgtcctcccaaatcaagtccttctgcactgaaggcacttccttccaattaggaagggtgatatctaccttgtctctggccacgaccccaagatatgtcctcaatctcttagcctgaggcccatcagccttccctatgctaggatcaacatggacaacaggcctctccgcaccaggagctttagtggccagtgacctcagccgtgttgctttcctcgtcttctttggtgtaggaggtggaggtgctggctcagcctgagccgctggtgccttaggaggacgatgtggtgtctcagcacgaggaggggagctgggtggtgtggtcatgatcctgaaaaaaacaagaatacagataagtaaagttaaatgacaagttatgttaaataacaaatagtatgttcaagtccaaaatacttaagcaaaacaaattacattagctaatgttaattaattctccttcatcatgatcataacgatttgcatgcacatcgtcaacctcgtcttctctgttgacgtcaggtgtttgtatggcgaaatgtgtgaaacttgtatcgagggttgactcgtcgtcgtcaacattaatgccaatggtttttccattcagcaccactgaccacctttcgtcacacggatcttgtacataaaagacttgtttagcttgttctgccatgatgaaaggttcatcttgataagctagcttgttaagatctaccaaagtaaatcctagatcctcgattcgcacaccactgttgacatcaaccccatgcatatgaaaacacagacagagaaactaacataattaagctcccatatgtcattaatgactccaaaggaagacaagcacgccaaacgtggattgttgtcatggacagtagcaaagtgttgtgactcagctcttaggctaaccccactgttctgcatggtggacttttcatcttgttgtttggtatagaaggagtacttgttgatatcgtacccttgccaacttctcacatttctttttgggccatctgctaactttcttagcgtttcagatgcagcttcatcactaaatattgtatgtttaaaccaattcaagaaagtattgttatgctctttcaacagcctattcttcgtcattcttggattactttgatgaagtagtgcttcatgacgaataatatatggcaggacttcattactgttattcaggacatacaaatgagcttgattcaattcctgcaacgaaggcgttataacatgtagccctcgtgtaccctttcctcccactctgtcctcgtgtcgcaactcaggaagaccaataggttttgctttctgtaggtattctgaacaaaattcaaccgctttttctgctatatacctttcaactatcgatgcttcaggacggtgtaggttttttgtataccctttcaagatcttcatgtatcgctcgatcgggtacatccatcgtagataaactggtccacatattttaatttccctcaccagatgaacaagtaagtgaaccattatgccaaaaaatgagggaggaaagtacatctccaactgacacaagataattgccgcctcttcttccaagtcatctaagcttacagggtccacgactttcgtacaaatggcattgaagaaaaagcacaggcgacttatggcatgcctgactttgttaggcaaaatgtctcaaatcgccacggctaacagttgttgcatcaacacgtggcaatcgtgagactttaatccaactagttttaaatccgtcatctgtacaaggctcttaatgtttgaagagtatccttgtggcactttaactcggcatagacactgacagaaacttatcttctcctttcttgacaatgtgtggcatgctggaggcaagtaaacttttttaccatcggaccgaggatgtaactactcacgtatacccatctcagcaagatcttgaagagtgttcaaaccatcatttgtcttcccttgaatgttaagcaacgtgccgatgacactgtcacacacatttttctccacgtgcataacatcgaggcaatgtctaacatctagatcagactagtatggaagttcaaacaatatggatctcttcttccataagcatgtattacctttctgcttcttcttttgactttttccaaatacagtatggatggcctcaacccgctcaagaacctgctcaccagttaggggaatcgatgcaagttcatgctcttgacttccattaaatggttttttcaatcgttgataaggatgataaggtctcaaaaaccgtcgatggtgagtgtaaactatttttcttccatgtttaagttgcaagtaactcgtgtcttgctcacagatagggcatgcatgatggcccttaacactgtatccactcaaattcccatatgcaggaaaatcattaatggtacaaaatagcactgcacgcaaggtgaatgtctccttacgatacccatcaaacacggcaaccccctcatcccacaagtttgctgagtcttcaatcaagggactaagataaacatcaatgtcatttcctggctgttttgggcctgatatcatcatagacaacatgatatattttcacttcatgcacaaccaaggaggcaggttgtatatgactagcaaaataggccacgaactgtgctgagtacttaaactgccgtacggattcattccatcactagcaagtgcaagcgttatatttcttggctctttgccgaactccggatacaaacgatcaatctttttccactgaagtgaatctgccggatgtcggagcatcccatcatagtttcttccctctgcatgccatgtaaggtcttttgcgtcatcttcattagcaaacagacgcttaaaccttggaatgatcggaagataccacaacaccttcgcgggagggcctttcgctgaactgtcatcactgccacattcgtcaacatctttcactttgtatcgtgataccccacacgtggggcatttatgcatttgttcaaattcatttatgtacaaaatgcagtcattaggacaggcatgaattttcttatactccatacccatcggacaaagtatcttcttagccttatagtaactgctaggcaacgtgttttcctctggaagcatgcccttaactacctcaagcagtgagctgaagcttttgtcactccacccatatctggccttcacattcactagatttaacaccacagacaacagtgtcaatgactccttgcaccccggatacaacggcttctttgaatcactctccaacgtatcatacataggggcatgtgcttgctgaaaagactcatggcccagatcatgaatcatatcctcaagtcaatcgccgatgtcatcatcaacccgttcagcatgcgagatcctctgcgtgtctgtcaactcaccatgccatatccatgtcatataagtcttcttaatcccatcgcacaaaagatgctcccgtatgtcttctagtgtttgtcgtctaccattcaaacaattgatacaggggcagaaatattttccatccccatcgggtggacctctttaggaggcaaattgtaagaaattttcaactccttgttcgtactcaaccgtgatgcgacttgcattcatccaagatcgatccatgtgcttaccaactctgagatactgacaaagttcatccatgcatgaaaacctcacttttttcattcaaggtgtggccctatcccatttaggaaggcatatctttaaagtatattcatagctatacgttgagtctttatcctaaatatgacgaaatttcggcagcatttcgctttggtctccaagtacacgaaatgaaagcagtgacatgagttccaccacagtcaagtatgcaccccagagaacaaagtgaaatgcattgtaccaaaatttcatcatatttaagacaagaatgacaacgtataaatatgaatatactaaaaaaatataagccctcccaaactgtccaaacggacaattcaagaatcaatacaatgattaatccaaactgtccggaagaatcactgtattgaatctcaaacgggaaactacggttcactcataatgaacattatttgtatatagacatagtcattaatggcataaaacagtttacatatagaagctaaaaaaggatgaaaggcattcgtaagtacctgagatgatggtgaatgctagtgtccaacaatgaatctggtgatgatggtacaaagaggcaaacaacaactacatacaaatgatagatattgataagtcaacatgttatattcagaaaaatggtgtgtatttgtgtatgtgtgtgtctgtgttgagttgcagagtattgaacaaaatggtgtgtatgtgtgtatgtctgtcttctagtgttgaaacctcttctattttgtcatactcttttacctaagttgttattcatgcaatgctaaccaccaggtattttgtagctacgcttaatcattcaactattttttgtaacatgctgcagctgctccttattggactaattttgaagtaatctggttttggtaagtagttttggaggcgtcagtatttgtggtgggactctaattatggtgacagtgataatatgctgatttagtatggttttgagttattggattactcatatggttcaatgggttgatgctgattgcgagcaactcgtggtggtagtgagagtagtgtgttcagtttggtttctaaaccaatggatccctaacagcaagtcttagcctcacagccacaactattggaaggcaaacaatatcatgagattaaaaatcctactgtagaaacaaatgatcatccacaactattgtttggtgcatacacaataatggtgcgtacgcaataatacctttcaatactactcttgcaatagacaattaatcagaagttcatacattgaataaaatacagtttgtcaaattaaaatcatagtacctaagagggctgcgccaaatcaaaatatgggaatgagaagcaaacaatggtaacctatcaaacgactgagccaaatcaaaatacaagcattagaagtagaaagttagtcaatctagtgaatattttataataaaatgtctttgttcttacgcagggaagagatgcaaaggatcaatcaatataatcctgaaagaagtctcagagaatctttttgtaaacctgaaaagaacatgctgacaatatcaacattactgcaaataaattaccatatatatttatataatcataaggatcagatcacatcattataggagcgttgaatgtcaagggttgcgctattcaataaattaatgccatgtgtggtagggaaggtcagcagaaaaagttggaggctgaacctggtaggagaagatgctatggatgctgtttacaaggtattattgaaagatatggaggacatcatggttgaatatgatgggacagtttagaaactcttattgaaagctatggatgttgtttggattgaaacacagaagctgtattcccttaaaatgacaaaaaaattagaatttcacaagggtgtttaggtctgaatttgatgatgaaaactggaagcctacttacatgcttaaagagcctgtataacacttaaaaagcatcagatagtttcgttatgtgtttgaggttgaagttcaaaagcttgaagctgatagatttcaattgcaactgagatacccactactgctgacagttctctgccactacctgttaacctgaagagacttatctggaatgctcagaagacatttaaggttgacttccgaacgccttcttatatgcatccaatggacattgtggaagccattcctaagctgcaggaacgacttaaggttgttgctggtgaaagtctgttgagtcaagaaggttagaagaatgctactctgctgttcaatattctgctctgcagcacttttcccaattaaagggtcttggaggaatacatgctttctcgtgaggcacttgggtgggtagtgggagaaatagattcaaggttcttgcagtcccttgttgctttctacagaattgattggttgtgtggcagcacaatcaattggagaacctgttactcagatgactgtcaacactttcaactatggtggtgtcagtgcaaagaatgttactcttggtgttcctaggttaagggaaatcattaattttgtgaagaggtgtggtatgatccaaacccgatgagtacaacaattgaagaggacgatgattttgtgaagtcctactatgaaatgcctgatgaagaagttgctcttgaaaaactttcaccttggttgcttcgcatagagctgagtcgtccaatgatgatggataagaagttgcgtatggctgacagtgcagggaagattaacattgaatttaatgatgaagcacccaacggtgagatttaggatgagtttgctaaagatgtttttttttaaagaaaatagaaagcaacatgctaactgaaatgaacttacgaggtatcccagacatcaataaggtttccataaaaaatactaaagttcataagtttgatgacaatgatggttttaagcctaatgaggaatggatgcttgataccgatgcacagttttcaccttatgttggtgggatggcattttctccttcttcatctcctggttacatctccgggatatagtcctacaagtccagcttattcgcccaccagtccatcctactctcccatatcactcagctacaaccccacattagccaggtacaatcctagctctcccacctacagcccaacttcaccagcttacaaccccacttgaccagcttacagccctacatctccttcctatagtccaacttcaactgactacagccctacatgaccctcttatagtccgacatgtccatcatatagtcctacatcacttgcttacagccccacatcgcctggataaagcccaatcaaaaaccatcgtatcgccgtacctcgccatcatatagcactacttcccctagttccaatcctcagtcagcaaagtatactccttcgttagcatattctccaagcagtctaagattgtccccatcaagtccatgttgtccctcatcaccaaactataggtttgtaattcatctaacctactgttgtgcgatttatgctaatgtatatgcggcaagtgcaccgatcgttaacaagtaataaaagtgtaagtaaagtatcgtctccatagggattggaaagatttcgcaataattataaagattatgattgaacaagaaaaagaaaaacacgcaaaagttgttgaatgattgtattgattaaaaaggaaatttaaacaaaacagtaaatttaagttagagaaattaccaatgagaaataattgtggtcaggaacaatcccttataagcattacctccttcaattgactgaatattttaacttgaagtttacataagataactctctcctatagttgtagatactagataactagcaatctcaccctttaaattgatcgagaaccctaaccttctagcgattctgtcaatctaagaattcaaagaacaaatcttatgggttcgtgttatgtttactcggagaataagtcttttctattttagttaatccctaatgtcttagtgaattaaccctttaaactgagttcataacctaatgtcttagcgaaactagtcagttcaagcaattaaagaacatattataacctccgcactcatgcatccctatgtctaggcgaagaacaagtgttaatcttaacaggtcagatattataattccaacgtgtccattgcgaagtataactctcaatactcattcagagtgatcaattctaaacaagattatagataagcacagaaaagaattaaaataaacaaaacatatgcatttaataccagtcaattttcagagggaaactcataagttcatggcctttccacaatgagatgattagctggccataggtttcaagaacaccaaaatatcagatgagttcatagttatgcagaaattggcttccaatcttgattcctagggtttttcactgaataacaaattcttcccaaaggctctctgtgtgtatatgtcttcgtgtctataaatccagaaaactctcctatatatcgagtattttaattacagtaactgagcaaaaaccctctcctattttcgaaacagatatctatttaattcaggaaagaaaatcataaccacgcgacctgcgcgcgattccacgcgagtcgcgtggattggcagaatagagtggcgcgtgtcgcgtgaaatgtgacgtgcctcgcgtggagtggcagaagggaattccttatttctttgagtcttcacgcgacccgcgtggatcccaagtatgtcgcgtgaagtggcagagttgaaaggcttaaatcttgaagttcccacgcgatccacttgaataatggcgcttctcgcgtgatctcctctggtcttccaagtggctcgcgtggatagtggcgcgacccgcgtgatgctccagttcttgtttccttttgttatttgcttttgaatccctctttttggcctgcaattgtttaaatgatattaaaatgccttatataatacaaaatactaaatgtgactaattctagaactattttctaactatttaatacaaatatgacctaaaactaagctataattaagatgtgtttgcaacacatcacctactgttacagtatgattgactaaatcaacttgggcttcatgcttactaatcatagttgggactggtattctgactgataaggttgtggaaaatgctggtgttttcattgtggcagccactatttcagttactgttcatgggccttggtataaacatttgactcacaacctgtaatatatttgctaagtacatgtatcatcataatagagatgggagacagcttattaagtaatttcatgatgattttgcaggattgcaaacatgtggaaacaggtgcaggttgagatggataagctatttcaggcctgatttaaatgggtaaagtatctctgcataaagatgtgtctttattcagattctactactttttctttagaaaccatatcttcagcctactgggaatccaaaggagtaagggatatgtatataaagaagccatgatccagtagtattcataatcatactaaaggcaaatatttgtgtatcttttgtacccaaaaacaaccaatatacatgtcgaatttgagtttcctaaagttcaattatagcttctcatggaagccctccacttgacgcaaaaatgtagccaagaaaaacagcttcatatcaagacagacatcgaatgaaggacacaatttccaaccaaaagaagatgaaatgaaatgggtgctcaaaaaatttgactccaacaaagatggcaaggtttgtcttcgacagtacaaggctgctgcaagggccttggttacggcggttggggaagctgaagcagtcaaagcatttagggtcattgacactgatggagatggcttcattgactttaacgagttcatggaggtgttcaatggagaaggtaggataaaagaaactgagatcaagaatgcttttcaagtgtttgatttcaatggtgatgggaagattagtgctgaggagttgtcccatgttctgaaaaggctaggagagagttgcagccttagtggctgaaaaaaaatggtcaaaggagtggatggaaatagagatgattttattcacttgaatgagtttacaaggatgatgatgagtgggaaggaactaggctaagtattaggactttgatcttgttcagtgtttcttaagtttatgccatgaacaggagttacaaggacaaaaaatactgtccaacgtacataagtccatgtaacaagaacttgacttgaccaaatcactgggtaaaagggaatatatgatcaattacatcatggaacacagaaacataatatatggagggtatggattcaacactgtatgcctcattcagacattaaaatgatttaagaaaatttaagacaataatgactttatcaattatacaattatgtatcacagccatcttctgaactgctaatgacaggaaacataccatattatgagcttcagagctgccactaattatctggatgaaaggaaaacagagtcatcagacattacaactaaaagactgtatagcatgatggtcaaaacataaaaatcagtctacaatagaatacctgaagaaccttctgcatacaagttttggcacagcctgaaaaggatgcaaaaacaatggggcaaggcctgattttcagcagctgtataatgaatacaaggtggtatttgtaagcttgagcctgagtatcaacttttgacaaattcaattttttgtacaaattcaacagtagtttaaaatataataactttacttcacttcaagctgctttacacaggtactacacaatgggatataaaagaagaacacctgttacaataaaacaacaggtgttacaataatgctttttatctcatccacactacgcaccctaccacaaacaattaacaccaaacaaaaccaattccagcaaatgaccagacaattatccaacaattttttaacaaaactacatcaatagatacccattgtgtctttcacatgaataagcaacacttaaaatagtgagaaagatgacttccattgtttcaggtttgcaaggccagcctccacaaggacatgaacatggatacccttttgtagctggaaggtaggcaaaagccattcatatataaaatgctacacatgtacatctgacatatggaacatttcatcttaaaaccacatactacataccctaccacaaacaagtaacacgaaacaaaaccaattccagcaaatgaccatacaatgccagaacattttttaaacaaaactacatcaacagatacccattgtctctttcacatgaataagcaacaccaacaagcatggaataaactcaagtacctgtgaagctaacaccaacgatgcgaaccacggtctcaagcaaatgatgcctcctactttggaaatccatgtgggtaacataaaaaccgaatagcaaccacttattagttcgaagtgtgagttgccagagtaccttgaacagaagacagcaaaagagtgtcaaatctaaggttagggaaagtacctgagcccgttcgagtgccgtcacgacaggtggagagtttgaaagcttggggtgacgtcacgaggttatggactgcttcgaatgaggtggagaggtcaaggacgaggagggaggaggtcgcgactgtaagagcgtaggttagggatgagagggaaaagttaagggtgcgactgaggtggtttttgatttgggggatgtctctaattttaataaagacaacatcgattttcatttaaaacagatgttaaatagtataccttaacatcggtttcattaaaaatcctaaaaatcgatgttaactacttcacattaacatcggttttcttaaaaaacttgaaaaccgatgttaactacttcactgtaacatcggttttgtttaaaaatttgaaaactgatgttaaatacttaaccttaacatcggtttttctgtaaaaacttaaaaaccgatgttaatttcgaatggttaacatcggttttaggtatttttatgaaaattgatgttaaattgatccttttaattacgaaattgccaccgcgttttctataacatcggtttttcatataaccgatgttaaagcagcgatgttaaaagccatttttttagtagtgactccttgataatcttgttaatttctgcattgttttttaattttagtttgtgttctttcatgttttactttgcgcataccaactgttcgacaaaattcccccttattattaccaatgatttgaagctagaaccatattgatcgtgtctttgagtcgacctaggttaaccctgtgctacagaattagattagttaaattgtttttgatgcgtctcgacaatgcaatatcaaaactggcgccgttgccggggatcacggttcattgtgtgctagctttaattcattgcaattagttcatagaagtagttttaattcttgcaattttacgttttgttgcacagctgtaacaccccgtaggcctccgacgtgttatcattaataatatcagattagcgtataaaatatcaattaattggttcagcggaaacataggatcgttttcttgataccttatgtatggaaacacataatagaaccataaaaacacgcccctactgatccagtttatcaaactcaacataataagacagataaccaagctttaggcagagtaacaacaatataaacatacacatgtactcagaggaaagtctcatatacatagtatccaagttctgtataatatatacatctcaggttcacaccacacacggtgcttgtaacaccccaaaattttgaatcacaatcaaatattggggtaaaatgttaactagagacagtatagaaggatttaagagaaatgacgaaaatacccttgggcattttagaaatgaccaaattacccctatgtattttagcaatatatcttaaggaggaaattttataaacactctgggatgcttgaaaattgatctaagcactcttagggtgacaattacagagtttccctgaacatttttggaaatgacgattttacccctagagtgagaggcaaaattatcaaaatgcccctgggtcaaaactgaccaagatgactttagaaaattgtgggaacctgaatacaggatagaatacctttagccaacacattattaacatgattggggtcagaaaaccctaaacaataatttctaggaattttggaaaatattttgaaaagagctcaatatacactacctcaggtatcagaaaacctcaagaaaataatgaatataatctatgaagttttctcttaattatgggaggaataagtttcctaaataagttagtttgataattttactaattagaaacaaaatggaccaataagaattcaaataaagctattatatgaaactaagaagatttttgaagaaaaaacttcctcttgactcctttgggtacggagaaatctctagataatatttcaaagatcccaacggttaaaagctagatacgtaagttaggaatacgcctttaaaattataagaagatccaacggtgaaccaattcagagtgagtattttattaatacgggtttttggagaaaaatcaataacctcttggcataaataagcaagctacggtttaagatgaagaaaacatccataacagccttgaatgatgaaggacacgtaaaaatgaagcaataaaggaaggggaaatcaagtcaaagaagccaccaataggaagcaactaagtgaagtctaagaaaatgattggagggacaaggagaataaatcataaatgcaagggaagttcaagtcaatgatggggggacaagaagaataatcatttaatggagggaatctcacttcaaaggagcaaggcacggttggtaaagaaaaaaatgtagagattggcctcaccaacattaagtaaccgtaggactacaagaaaaggaagtagcaaattctctttgttttgattggttgagataagggttgaaaagtcttcataagcttccattggttccttacttgactttagaagtcactaaatatgttaaaatgccaaggtgaagctacggatggccctccctcttgtagcaaaaaaacgtgagtaaatttgggaggcaagggagtaaatgttttgtacttgcaaagcttggttggaaggaattcattggtgagtcaattaatgaagacttaagggataaggttgcattattaagggtgacctaagaagggaattatataagggatcgtagcaattgaggaaagctacggatgctttcactcaatttaagctttgtcacttttagcaaaacatccccaccttttcaccaaagtgaccgtgccacttcaagtgttctttttctttcaaaaaaattcactttcaaatccttttcaaattccatcacaaacaaaattccaacaagccaattgggggagatagctacggggaggaagtgaaggaattcaaggccaaacataaaataacatcctaagctaaggtgagggaagttttgataaattaaatttaagtatatgcaaaagctattattatgatggtttaagatggtttaaaggaagttaaggaattaagaggccttagaaaaattaaaagaggattatgatagtgatcttagtagaaagtaactaaatcaatttaaaacaatttacaagattctaaaggataattgagaatttagtttatattccatgaattattttgattatgggcaatttatatgttgttatattccataaattatgttgtttatatttcatgaattagtttgattaggaaatatatattcattaaccaagcttattttgaaacttgtctttagtcttaacttatgaacttgtgtatctatgttgttgttaactgtggactatataacttactaattctgttattagtaaaagattttaatggaattgagtaaaagacttctgataaaattacgtaataaggactgtatggaatcatttggacttgagactgtgataatgaccctgtgatgttgtgatgagactgtgatggtaaccctgtgatgttgtgatgagactgtgatgatgaccctgtgatgatattgagttgtgatgaaagtgatgatattgtgataaccctgtgatgatatgactctattgagttatgatgaaaatgaaaaataatttacaagacgtaaaatgaatcatgtatgcattttcatgtgcatctacccggtggggtagaatttgagacgatgagacgatcctcgtgaagaggtgtgtcagatagctagagttgagaaagagcgttctatggtgatgaactgggggaagtggccgtggggagatcacctacccatgatgatcacatgtatagtaggtgtgagtcctattgcaacacggacctatcctgactgatcgatccaactcgcgaggtgttaagctatctgacagtggccacaatttttagatgttgctgagatctcagtcatgcatcatataataaagatgagcatgcattttcttaggtgttgtgtgtggaatagaaatgatttaattcatttgtggagtaaaatcgaattaacttttaataactgtgataataagtcctctaggatttatctctgtattttatctaactagtacgtatatttaatatttctgtatctaatatttttgtatatatttaaatttggtttatcatgacttaccctcttttgtgtcttgtggttgacacctgtgatgaccccaatttatttgggcgagcagaggaacagtgaagtggatggtgtgtactagaagacgtagctgttgtaaatctctgtctatgatgatctatatttagtactgtatcatggactagatatatatggactgtggatgtgtagtggtttgtatgccatggactgtatattatgaatatgtgatatatgtctgtgtggacgaacgcgatggctatattaggtaattacgcgtacatttctatatgtttggaaagctgtgttgaaacttcaccaatttaatttgaagttttggttaatattattatttatgtttttcgaaaatttaaaagaaaaagaaaaaattttagtcacaaattaataaataaaaatggtcgttttcaaaatcagcatgcaataaaagcggtcgtgttaaaataaatacgtaatagaagtgggtgtttcagtgctacaaaagaatataatccctcagaaggggtatacagaactataacaaaaatacatcaaaatggagccctcaagctctctatactgctcctcaactaggcagcctagtctctgatgggcctcttgccctgagactgctcttctcgtcctgatggttcacctgaaaccacataaaccccacacggggtgagataatatatctcagtaagctcaggatccatggaggaatctcctccaccctggcccactaacatcataagcacaacaacaataacacaaacagatggctcaccggcctagcctctgattcatacaacattgtaacataacatatatgcatagtcaaacacaatagagcaggaggaattgtctcctgtattaatgccacaaaataggaggaattgccatctcctatattcacatctcagagcaggaggaatagccatctcctgtgctagcattcagtagtaggaggaatagccgtctcctatatcattgtatcaaagtaggaggaattgccatctcctttaacaatatatccagcaggaggaatcgccatctccggggaggaattgccatctcccatactatctattggccaatagagctatctcagcacaatcacaacataattcaaacacagaggcatacatatatcgtcacaagaatgcagatatccatgcatgcattatgaatgcccacaactcccttggagtgtggtgtgacacacaagatgggaatcatccccagggacactgaacttacctggaacaatatcaccctgtggtctagtcccagctctgtgactcccgccaccagtaaactcaggatcaacgcctatacaaggcatatatatatagctcatatcaatattcagaccacagacatcaatcacaagtatataaccatataagtcccctatcctagggtttaaccattttagcctagcacacactaggccataatatcataacgtgaaggctatagcatggcagaaaccatcagcctcctcagacttagaaaccgcaggaatggcctaacctccatcaaggtgccattcaactagcctcacaggctcataacagacatagtctaggctctggaatggcctctacactaatgtagactcaacacacaggccacacagacaaaccacagagccaaaatccaaagtcatcagaatcaaaaactgaaagctaatccttcatctatacgaagctctgatcaacttcctcaactagaccctgagctaattctagtcccagctcatatgagtcactattcacagggacccccagaatcaaaatcaaacggtgaaatctaagtttcttacctcagtggcgcacccaacagcctcagaacagtttctcttagcttccacgttccagttacgctgtggttttacgccaagctcgagtcctctgagcttttccttctgaggttcctcttctcactcaatctggggtttacaaggaacttgatgaaggattcaagctttctactctgtgcaatcaagtttctaaggctcaggaaagtgtttaggctgagaaatcaagtcctaggaagctcaaggactttaacaatggaggttggctcaagggaggaagaagaaatggtattccctccatttctcacgttctggtcctttaaatgctgatctgccaacgttcccacgcgtttcacttgggttcccacgcgactcacgtgggatggcagacagaaatgccatttctaagccacttcccacgcgactcgcgtcgtttcaccacgcgactcgcgccattcattcgggccttccacgcgacacgcgtggatcccaaatgactcgcgtggaactccagagaaaaccatgatttctggaccacttgccacgcgactcgcgtggatcgtcaagtgactcgcgtgacatggcagagtcatctgccctatattacacatatggcgcgcgtcgcgccgcaccccaagtgggtcgcgccatatgccagaaccaccataaaacttgcattttaagcacctttcaacgaattctaaagctattacctttggcgccatcaacgccaatcctggtgccaccggcgccgcacccttagcagggttttctgacctgaatccccgcgttatcgcgcggggttaagcgccgaaaatgaaagtccttacaacagctatgcttgttacatgattatgtgcttgtggttgctgcattagctatgtatttgcccataaaaatagaggaaaacccaaaaaaacaaagacaaacatccagttggcgctaatagtgtagcaattcacgctaattgcgccatatattcaaaatcaaggacctttgtcgtcgtcctggcgctaatcgcgccatatattcgaatccaggacctgatgttgaagtcttggcgctaatagcgtggaatccacgctaatcgtgccatagattcgaacatcccacactgatagcgctagtctcacgctaatagcttgggagtaaaaaaaaagtctgaaattttaaaatttatttttcgtttaaactttttagggttgtttttgtgatttttattgtcctttatgagttgcattgtgtatgactaggtccacatcaagtgaattacattcatttgacctgagatagataggacatttcataattaaatggacataacattaagttagatgactttgatagtgtagttttagacagtagcatagtgtcttctaactttgattctgaatctacttctactccttctacttctacacatcttgatataatggttgataacaacctaactcttaaggagttagctacacctgatgttgtttaccaaccttagtgtattcaatatcctgagactgaggtcagttatgagctaaaatctggactgattcatttgcttccaaagtttcatggacttgctggtgaggatccacataaacacctcaaggagtttcatgtggagtgttccaccatgcgaccacatgacgttcatgaggattatgttaagatgaaggtatttcctttctctttggatggtgttgctaaggactggttgaaccttcaactagatcttatcaacacttggacagacatgaagagaagattcttggagaaatttttccctgcctccagaacagcatccactcggaaggaaatttgtggcataaggcaatttcctaaagaaactttgtatgagtattgggagagattcaacaagctgtgtgctacctgtcctcaccatcaaaccagtgagcaattactgattcagtatttttatgaaggcttgatgttgatggacaggagtatgatagatgcagctagtggaggcgctctaatggacaagactcctcttgctgcaaggcagttgatttctaacatgacagccaactatcaacaatttggtgctagagttgcaacatccaaggttgcaagtgaagtttctgtttctatggttgctgataaccagatattggagaacaaattgacagagttgacatcccttgtgaggcagcttgctgttggtcaacagcagaatgtgatggcaaccaatcaaccaaggctttgtggtatctgttgtgcgcttgatcatcccacagatgcatgccccactctccaatagacagaacaacctgctgaagtttctgccatgcaacctggccagacattcatgttgatttaaatggagtcacttgaagaatggacaaaggatcaagcttagttttgtgcttccaacatgccttgaaaccttggagattaatttgtgattaatgtaaaaggaagaagcatttttggtgatccaagtgcatagcattcatatcattcattaagttaattaggttgagttacaaaattcacaagtcattgataaattggttaagttttgaattgaatcaaaagtttttggaaaaataagtttctacttatttaatcgattacattaagataagaatcgattattttgttcttagtgctttctggaaaacttttcaagaacaatgtaatcgattacgtatcagattaatcaattattttatctatgatttcatataaactgctttaatgaacagtttaattgattaccaacaatccataatcgattacatagggtaaacagaaaaaaatcatcttcctgtcttaatccattaccaaagacaataatcgattacatcatatgcctatgcttaacatgttttgctacattaatcgattaccaaatatagtaatcgacaacatagttcaatatcgtttctgacgcttcctggcttaatcgattaacagaatctgtaatcgattacatagtgtttttcaaaatatgaagcttcctgacttaatcaattacaagaattcatcatcgattacatagtgtatttcaaaatatgaagcttcctgtcttaatcgattacaagatggaataatcgattattctgttcgttgcttatacccaaaagttttgttgaatagtttaatcgattacagtcttgaaataatcgattaataagcaaaacaatcgattacaagagcgtatgcaatcgattactgacagttagaaaaatttgttataaatagaactcttgctcaaatgttttagatacttgatcaatacgtattctaagcattctaagtctgtcaaaacattctcttagtgattttctgggttcattgagttcttgctttcacaaaaacacttatggattgttaagtgattcttgaagcaagaagtctcttttcaaaggataaggagagtgatgttctgagtttgtgattcattattaaatctggttattcattcatctgcatatcatttactggatcttcaggtgatttctttccttatctttgtggttgtaatttcattttgattttggatgtatttttgtctattgtaattgggtttcttgcttgtaatctagaaataatgtttctctaggagatgtgctgagtagtgttctcagtgggttgtctctaagaatctaatagtgttttagatttctgaactttatctagggttgataaagggagactttgtaattacttgtaagaacagaatttgcaatagtggaactccattctaatgttgagtgaaagaaaattggatgtagcttcatagtgtttgaagtgaaccagtataaatcttgtgtgctctgttaataatttctttcttgattattttactttttttatcaatttaactttgagctggtggatctcttggactgaacatttgattgaataaagtttcttggttttaaaagtgataaagatccaaaggcaaaaactctgattttgttaaagaaaattttaatttcccaagactaaccaattcacccccctcttggttaagtgtgaagtgttcctatcttttacaattcagacctcaacagtagtataatccttactccaacacttatattcctggttggagagatcatccaaatttgaggtatggtcctggtccacaacaacagcaaccttttagacctccacagcagcccttccatcctgccaccaccaaataccaacctcctcctttctataacaccccggacgtccccggtatgttatcatcaatgatatccatatcacactatcagcattaaatacatgtggtgcggaagcgatagaatcgtttatcttgattacattatgcatggaatataaaaccacataacaaagaacataaaacatgcccctgctgatccagataatcatactcacaacaactaggcagataaccaaaactaaacagaaaaactcaggaggaaacatactttcatacaacaaatatatctgtacatatacatgctcaaaaacaagaccacagctggtcatacattataatatgtacaggaaatgggtatacacataccctacaactacacagagatgctaagaccagcttcaactcttgaagctctgctctgatcttctactgtagcctcccatccagcctatcaggtccactagggcctcctgccctgaggtcgctcctctcaagaagcacctgaaaccacaaaccccacacagggtgagacaaacgtctcagtaaactcagggttctggggaatcccccctaaccctggttcatcaccaaacataaacaaaacatataaacagagctaaggatatcatccctgctcacacatacgaaacctaggatatcatcctagtttccacacatcccagccatctgggtccataacaggatgctctcagcatcagaggtattccacctcgtcatggctctcacagccatccatcagagatcaaagccatcaccatggcatcagtatctcatcctggctctcatagcctgtctaacagatatctcacagaggtacctatcataagtgtcatcccttggacacttctcaacacaagagaggcaccgcctctgaatcatacaaacattgcctgaggagatccctcaactcaggactttgagaatacagacattgcctgaggagatccctcaactcaggactctgaaccatacaaacattgcctgaggagatcccttaactcaggactttgagaatacagacattgcttgaggagatccctcaactcaggactttgagaatacagatatggctcatctaaaaggccctaggctctaatccccctcgggaagccctctcttagagatacaacatatctatctatcatctggcctgggaataccctccaggactttcacaacacatgcctgggcaagaacctcctttacagggcaatcacatccaggacttccacatacattggcctgggaaagaacctcctttacaaggcaatcacctccaggactttcacaaatactggcctgaggataatcacccaggacttctaacatctttgcctaaggaggaacatccacacagttccatctgtccttaggacttaggtggagagcagtggcacctcccaaggaatctcagctattccagggagtcctcaaactctactttagctagggaacctcaactagcttgatactcatccagtatcctctaggttccaccacagaccatctcatgatctgcattccctcaaaggcccacggcctcacacctgccatattaggtgtctcattaccctcacactatctcagtgtctatcctagggttcatcattgttgtttcacgattaacggcaagtgcaccgatcgtttaacaagtaataaaaggggtaagtaaagtatcgtctccacagggattggaaagatttctcaataattgtaaaaagttttgattgaacaggaaaaacagaatacgcaagagtttgttggatgattgtattgaattaagaatttaaacaaaacagtaaattaaaacgagaagtttaccaatgagaagtaattgtggtcaggcgcaatcccttataagtgttacctccttcaattgactgatggttttatctttaagcttacataagataagtctctcctaaattcgtcaatcctagactcttaagagcattaactagcgatttcactctttaattcgatcgagaaccctaaccttctagcgattctgtcaaactaagaagtcaaagaacaaatcttatgagttcgtgttatgtttattcggagaataagtctttcctattttagctaacccctaatgtcttagtgaattaaccctttgaactgatttcataacctaatgtcttagtgaaactagtcaattcaagaaatcaaagaacatattatacctccgcactcacgcatccctatgtctaggtgaagaacaagtgttaatcttaacaagtctgatattataattccaacgtgtccattgcgaattataactctctatacctattcagagtgatcaattctaaacaagattatgatgaagcatggaaaagaattaaaacaaacataacatatgcattaataccagtcaatttacagagggaaactcataagttcatggcctttccacaacaaggagattagctagccataggcctcaagaacaccaaaacaattggatagaacatgattctgcagaattggcttcgatcttgattcctagggttttctgtgtaagattcaatctatggaagtgtatatttctatgtctctgtctgctagctctataaaagctccgaaaacacccttatttatcgaatattttaattatagtaacttatcataagccttgtcctattttcgaaacagtatcagtttaattcaggcaagaaatcagggtcacgcgactcgcgcgcgacaccacgcgagtcgcgtgacatggcagtgttagatagcgcgacatgcgtgacttgtgaagtgaatcgcgtggctttccagagttgaatggcttattcttgaagatttcacgcgactcacgtgaaacatggcgcgagtcgcgtgattctttctggacgtccaagtgggtcgcgtgagtttggcgcgatgcgcgtgaggtggcagttcttgttttctcctttatttgctcttaatctcccttgtttggcctgcaaacacttaattggtattaaaaatgctttatataacataatatactaattatgcctaattattatacttattttctaactttttactctaaatatgacctaaactaatgctatatttaagatgtgtttgcaacacatcaatcattatagcccaacacacactaggccatcacaaattccaaatatctagaacggcctgagattcactcaaagcaccgttcatcagcctctcaggctcagaacacatgtatatatatatatactcatatatacatatcatacatcacccattcgggtggcaaaccagaataaggggaaaaccccagaacaatgagcttacctggctagccgtgcctcacagctctagcctccactgatggtctgctcctctgacacccactgtgtcaagccctaccaaggcatacaaacatatgtcacagaccatacaagcatacaatcctgcctaagctcatctagcagttctcaactgcctctgtaaaggaaccacagtcctttccctcaacctgagtcaattactctaagattcatcaggctcatcctctacaagcctttccatagacctcagtggtctatcacagatcatccatggcctcagagtcattccagactcaaccaagccatcatcagtgagcatcaaagctctctcaacccaaactctcagggtttctcgggcttgaacggttcacatcacaggacaccctctcaggcatgacaagcccatcagtaaggctttggcatgtctcatatcaagtgactcagtccaagtcacacatgccctcacctagagccaaaactaacagtcaccaaatcataaactgaaagctaatccttcctcctcacatcattctaagcacatctctcaactggacccagagctaattctagctttatcacagatgggtcactattcatcaaaaacccccccaatccaaaatcaatcggagaaactcgagtttcttaccttagaactgatgaggaaggcctctgggctgctctcccgagccttggtgccgctgaaccactgccattcctcgccagtactcgagttctcttcagctttcctctgagaagagcttctctggggttttaatgaaggtggaggaaggattctcgctctcacagtttctagggtgattaaagggttcgggaatcgtttagggtcatcaggcaaggtcatgggagcttgggaagctctcccattgctgctggagctctgaggaagaagaaaatggttttcttctcctccaaaacgcgatcttccctttaatatagtctgcaccgaccttcacgcgcgatctgcgcgggatgccgtgccatccgagccagctgcaggactgtggcgccatcagcgtcgctcccacaccaacagcgtggacaagccgaacctctgcgcgatctgcgccaatccccgcgcgatccgtgccaccaaccacacccaattggcgcccccagcgccaactctagcgctccaggcgtggacctccaaagaatctcgcgccaccagcgcgaccctggcgcccctggcaccatattccagagagtctggcgctacccgcgccacacccttaacagggttttctgctgaaggatcccggagctatcagcgcgggatctggtgccacccgcgccacagtgagggtctttacactttcagacaacagccacagttccagcaacctgcacctacacctgaacaacctgtgcaggccagttctggaccttccttggaggatttgatgaagtaaatggccaccagcaatatccagtttcaacaaaatgtcagttccaccatccaggacctgcagactcagattggatagttagctacaattgtcaaccagatgtagcaacaaggttttggtaaccttccagcacaaccagttattaatctgaagaatgtgagtgctattaccttgaggagtggcacggagcttccagatgctggtgctaaaattgatgctggtgctggtaaaaaagttgatgatggtgccaaaacagattctacaccaaaacagatttccttaccttttccttctagagccattcctgcaaagaaagtagtggagcttgattctgatctacttgagacttttaggagggtggaagtcaacattcccctcttggatgatatcaaacagattctaaaatatgcaaagttcctgaaggatttgtgcacccataagaggaagctgaagggaaatgagcaagtgaagatgggcagaaatgtttctgcactgatacagggcaaaactgttgatgccattccacagtctaccttgccacagaagtgcaaggatcctgacactttcactgtcccatgcaccattggagatattacttttgcagatgccttgtgtgatcttggagcatccattaatagcatgcgcacatcagtttacagatcactacaccttggtgagatgaaacccactagtgttgtcattcacttggccaacaggagtgttgcgcttccacttgaacttattgaagatgtgctggtgcgagttaataatttgatcttcccagtagatttttagattttggatatggagaatgagtcttccaaccatggttccacattgatcctagggagaccattttgatgacagccaggaccaaaattgatgtgcatgcaggaactctttctatggagtttggtgatgacattgttcagtttaacatttttgaggctatgagacatcctgtagaggaacattctgtttttcttcttgatatcattgatgatgcaatagatagtgtagatatttctaatttactttctgatttttcttctgatttttctaattttgatcttggttcttgtaattgtacatgtgatgattttgctgctgtgtgtagtatttgtgtggaaatttcctccgtacttcactctgattgtgttccaggtacagatacaggttctgaggctactatcccactttcctcttcccctagtctttccttaccttccgctattcagccaccttccttggagctgaagtcactacctgagcacctcaagtatgcatatttagatgatgctcagaagcttccagtcatcatatctagtactctgacactgaagcatgaagagaagttgatgcatgttttaagaggccacaaaaaggccattggatggacacttgttgatcttcgtggaattaatccttccatctgcatgcattggatacttttggaggatgattctagaccagtgaggcaaccacagatgaggctgaatcccaatattcttgatgtggtgaagaaggaagtgacgaagctgctagctgcagggatcatctatcccatctcaaataacacttgggtttcacctgtccaagtggttcctaagaagtcgggtctcacagttgtgaagaatcaagataatgagctgattctgactagagtgaccaacagttggcgagtttgcattgattacaggagactcaaccaggccactcgaaaggaccatttccctctaccattcattgatcaagttttagagaggttggcaggtaaatcacattattgctttcttgatggtttttctggtgtaacgcctctcgtgactctctcgtgcttgattgattttaattaaaaacttgtgtcctttttgtattaaaatgatcttagtagtaaatttttcatgaaaattctttttgccttgctaattttatgattcataaatagcgtaaacgattttcctcaccacggttcatataataagaatagagtccatgatacagtccaaagtcagttttccaaaataatatacaggctatctattacaaattacatgccatatgaaattacaatttacagcaaacagttcatcacaacttcttcaacatccttcatctacaatttacagcttacattgaggacaatgtgcatttcaagtgggggggtgaagggtccttaaaatttttgtttttgaaactttggttattttctgttttctgtttatctgtctgtctgtctgtttgtcaatgtctgttattttctgttttctatttatctgtctgtctgtctgtttgtcaatgtctgttattttctgttttctgttttctgtctgttttctgtttagctatctgtatatattctgtttgcctgtttcagtttgagtctgtatatatttttgttgtctgtttctgctgtttctgtttgctgctgtttttaatgaatttaggcaatttttcatgtttttcataggatttctaatttgcataaattgtgagaaatgttaaaaagttggttggattgagaggtttcatacatgatgtgaatcattgttgcaattgttgaagtgataagtaggcttgagaaatagaatttaagatgaaccatgtgtggtagaactatcccttgtgagtttttgagcctttgtgaatatgttctttcatgtgtgatttcacccttgtgctagattactctatgttttgtcttgcctcttttgacattccttgttgcacatgctttgattgagatgatttaggccttctttcttttagccactagccaaataaacctatccttgtgttgatatccattgtcaccctctttgagcttttagccttttctttcttgtttagcccattaaaaactaaaaaatgatggaaaaccatgttaccctagctttagggagaaaaggggctttggaattgttttgggagtgggtttcaaacaagtgtggggtgtttgtcttttgttttgttttgaaagaaaagaaaagaaaaaagagaaaagaaagagttcaaatagcaaaagttcaaagaaaagaagaaaaagaagaaaagtagaaaaaaattgtgtataagcaaagaaaaagaagttcaagcaaagaaaaaaaaatatatgcaataaaagttgttatactttattttcatccttgtaaattctttcaaatttcaccttgcttctacccttcttttatcttgttggcttgctccccattgtccctcttttctcttaagctttagcctaaatatccttttcttatccacccttccctaagccattcattacaagctaataaagtccttttgatcttttgatgcatgtgtatttcaagttgaatgaatgagaggtttgtcaatgcttggatgtactacttacatgtggtgtttgagtgtaaatacaagccatacacatcatgtgaggttgagtgccaccctttgagagaattctatcaccttggtgcattcttgattctaaacttggctactttttcactttgcactttgtgatcatgttttcatggattgtttgtcacctcaatattattcttccatctttccatctctcacttttgagcattgttatgatccattgaaaaatatgtgtgccttgttcatatcctttctttaaatttttggtttactttaatttgaattttttctcttagtctttcttttagttttgcccaggagtgcaaaagtttaagtgtgggggattttgatagagggtttttagttgagtatttttctatccttcttagcttatttgacctctcttggacctttattttcctattctaattcagtttttggcctaggtaagtaagtgggcttaattgctaattgttgcgtattttcggatttttggctcacttgatgtatctgacttgtacaagacctatagggagctaccgatctctgaatggagcgttctaggagtccctagaaagataacgaaaagatctacatgtttgctgcaaatagcccgaggccaattctgtcatttagagggtaatttttagctttgaagttaacgtccttgcacttgtaattttgggctacgaatttgactttcatggttgtaaatagcaaataattagattgttgagtttgtttgtggcccattttattttcagaacttagtcactatatgtattagtgacttagtgaaacttggacaacacacttataattcaataaacaacttttacatttcttttctttagtttttaggatcaaaagcttgttcttcattttctctcaagtgttcttcattgttcttcatcttcttcatttccattttactattcctccatttttctgcactcatttcatggggctttccttggtgatcatcatgggaggctaaatcactaatcaatccaaggatctaactcaagcaagagaagaattggagttccggttcggtatttcgatttctacttgaatattcaccttcttcttcaatttctactatgttttcatgattatgaatgcatttgggattgaaagtgaattaggattatggattcatgtcttaatttcaaatgataatcacataattaattggatgatatttcaattagggttgtggtttcaattaaattaggggttaattcgattgaacaatttctaatgagattgaatgaatgttcatgttagaatcaacttatgggaatgttgatgattcaaatagcttgagttagtgaattggattgatgctttctcatctgttttactttattccttgataatcttgttaatctttgcattgttctttaattttagtttgtgttgttgcatttttactttacgcatatcaactgtttgacaaaaacccccttattattaccaatgatttgaagctagaaccatattgatcatgtctctgagtcgacctaggttagctctgtgctacagaattagcttagtaaaattgttttggtgcgtgtcgacaacgtggttatcagaactggcgccgttgccggggatacggtttattgtgtgctagctttaattcattgtaattagttcatagaagtagttttaattcttgcatttttacgttttgttgcacaactatgtttgttacatgattatgtgcttgtggttgctgcattagctttgtatttacccataaaaacaaaggaaaacccagaaaaacagagaaaaacccagaaaaatagagcacaacgtccaattggcgctgatcgcgcggctcccacgctgatagcgtgaactggcagaacctcccgcgctgatcgagccagaccggcgctagtcacgccacaggttcggcaatcccgcgctggtagcgctagaccggcgccgatagcgccagcttcccgagcatcccgcgctggtagcgccaatctcgcgctaatagcgccagcgtaaaaaaaaaaaaaaaaaaaaacttaggtgcattgtgcatgactaggtccacatcaagtgaatttcattcatttgatcctgagatagataggacatttcatagattaaatagacaaaaccttaggttagatgactttgatagtgtagttttagacagtagtatagcgtcttctgactttgattctgattctacttctacacatcttgatattatggctgaaaacaacctaactcttaaggagttagctacacctgatgttgtttaccaaccctggtgtattcaatgccctgagaccgaggtcagttatgaactcaaatctggcctgatccatttgcttcctaaatttcacggacttgctggtgaggatccacataaacaccttaaggagtttcatgtggtgtgttccaccatgcgacctcatgatgttcatgaggattatgtcaagatgaatgcattccctttctctctggatggtgttgctaaggattggttgtaccttcaaccagatcctatcaccacttggactgacatgaagagaagattcttggagaaattcttccctgcttttagaacagcatccatccgaaaggaaatttgtggcataaggcaattccctggagagtctttgtataagtattgggagagattcaacaagctgtgtgctacatgtcctcaccatcaaatcaatgagcaattattgattcaatatttttatgaaggcttgatgttgatggataggagtatgatagatgcagctagtggaggagctctgatggataagacccctcttgttgcaaggcagttgatttctaacatggcagccaactatcaacaatttggtgctagagttacaacaactaaggtgctggctgcaaatgaagcttctgtctccatggttgctgataaccagagattggagaacaaattgactgagttgacatctcttgtgaggcagcttgctattgagcaacaacagactgtgatggcatccaatcaaccaaggctttgatcatcctacagatgcatgccccactctccaagagacagagtaacctgctgaagtttctgccatgcaacttggccagtcatttagacctcaacagcagtataatccttactccaacacttataatcctggttggagagatcatccaaatttgaggtatggtcctggcccacaacaacagcagccttttagacctccacaacaacctttccagcctgccaccactaaataccaacctcctccttttagacaacaaccacagttccagcaacctccacctgcacctacacctacaccacctgtgcaggccagttctggaccttctttagaggacttgatgaagcaaatgacaaccagtaacctccagtttcaacaaaatgtcagtgccaccatccaggacctacaaactcagattggacagttagctacaactgtcaatcagatgcaacaacaaggttctggtaatcttccagcacgaccagttgttaatccaaagaatgtgagtgctattaccttgaggagtggcacggaacttccaaatgctggtgctaagagtgatgccggtactggtaaaaaagttgatgatggtgccaagacagattctgcaccaaaacagattcccttaccttttccttctagagccattcctgcaaagaaagtagtggaccttgattctgatctacttgagactttcaggagggtggaagttaacattcccctcctggatgccatcaaacagatcccaaaatatgcaaagttcttgaaggatttgtgcacccacaagagaaagcttaagggaaatgagcaagtgaagatgggcagaaatgtttccgcactgatccagggtaaaactgttgatgccattccactatcttccttgccacagaagtgcaatccttcagagactacgagtataataggagcatccgtcaacaaaaggatcaccctaagatgatcatcttgtggctattgagaacgaatcaaatcagatggttctatttcttattcttgatgtttttggcactttctctgtcccatgcaccattggagatattaattttacagatgccttgtgtgatcttggagcctccattaatgtcatgcccacatcagtttatagagcactacacctgggtgagatgaaacccactggtattgtcatccacttagccaacaggagtgctgcaattccacttggacttattgaagatgtgctggtgcgagttaataatctgatcttcccagcagatttttacattttggatatggagaatgagtctcccagccatggtcccaccttgatcctagggagaccattcttaatgacagcaaggaccaaaattgatgtgcatgcgggaactgtttctatggagtttggtgatgacattgttcagttcaacatttttgaggctatgagacatcctgttgaggagcactctatttttctccttgatatcattgatgctgcagtagatagtgtagatatttctaatttactttatgatttttctgatctttcttctgacttttctgactttgatcttggttcttgtaattgtacctgtgatgattctgctgctgtgtgtagcatttgtgcggaaatttcctccgcacttcactctgattatgttccaggtacggatacaagttctgagcctactatcccactttcctcagcttctagtcttcccttaccttccactattcagccccctttcttggagctgaagtcactacctgagcacctcaagtatgcttatttagatgttgctcagaagcttccaattatcatatctagtaatctaccactggagtatgaagagaagttgatgcatgtcttgagaggccacaaaaaggccattggatggacacttgctgatcttcctggaattaatccttccatctgcatgcatcggatacttttggaggatgattctagaccagtaaggcaaccccaaagcaggctgaatcctactattcttgatgtagtgaagaaggaagtgacaaagctactggctgcagggattatctatcccatctctgatagcacttgggtttcacctgtccaagtggttcctaagaagtcgggactcacagttgtgaagaatcaagataatgagctgattccgactagagtggccaatagttggcgagtttgcattgattacaggagactcaaccaagccactcgcaaggaccattttcctctcccttttattgatcaagttttagagaggttggcaggtaaatcacattactgctttcttgatggtttttctggttacatgtgatgtgttgcaaacacatcttgtttttagtctagttttaggttagaatttgattaaatacttaggtaaatagcttagaattagttgagtttagtattttattgtttaaatctaatttcaatactaattgtgcaattttaggtcaaaagaggagaataaataataaaagaagcaagttctggagtgtcacgcgtgtcgcgccattactcgcgcgagtcgcgtagaagacccgaggatatcacgtaggtagcgccgttattcaagtggatcgcgtgggaacttcaagatttaagccttttaactctgccacttcacgcgacatacttggttatcacgcgggtcgcgtgaagactcaaagcaataagcaattaccttctgtcacttcacgcgaggcacttcacacttcacgcgacacgcgtcattcctttctgccagtccacgcgactcgcgtggtatcgcgcgcgggtagcgtgaggttgaaacagtttccttatttaaatcatatatttcaagatttggtattatattaggattagttgccttaattaagtgattctataaatatatttagattccttaattaagaagatttgatttagatttggaacagaaaataggccttgttaccttaattagatctatctataaataaaggcctctggggggggttctagagacatccattatctcacatctctaatcatcccaccattaccttctatcatccattctactctctccttctcatattttcaccattggaagtcaagaatcaaggcaaggtcaatcaagaatgtcttatgtgatagcgtttggtttcttgaagcctatggcagactgaacttgtattgtgggaagaccatgaactgatgtaactcctctgtaacttgatttggtattggtttcaatgctgttttgattattttattctactctgtgctattcaatgttttattcttatttggatttggccattctatttaagtattgagggttaggattcgcaatggacacgttggggttctaatttctgacatgtttagaataatagttgctcttcgcctagacatagggatgcgtggctacggattttataatatgttctttttcatgcttaacttaatagaattcaccaagaaattgggtttttgaattaggttaaagggttgattcactaagactttagggattaactaacttaggaaaggcttattctccgaataatcttaacaagatcacatgagatatattctttgaatacttagtttgacagattcactaagggtttaggattctcgatcgaattaaagggttaaatcgctggttatgactctagtagttctaggatttacgaatttaggaaagatttatcatgtgtgtgacttaagataataaaccaatcaagtgaaggaggtaggaacaaaagggattgtgcctgaccacaattgtttcttccattggtaaattttcttactattttattacattttaatttctgtttttattcaaccaatcatccaacatcaacaattatctctttatttgctattttattttccaatcatttagaattaatattattgtaaaaattaccccaatccctgtggagacgataactcacttacctactttattacttgttaacgatcggtgcacttgccgtacacattcgcataaatcgcgcaacaacatgcaaatccacattgcaccagaggatcaacataagaccacattcacctgtccatttggcacatttgcttacacccggatgccttttggcctatgcaacgcacctggcacttttcaaaggtgcatggtaagtatcttttctgatttattagagagttgcatggaggtgtttatggatgatttcactgtttatggttcctcttttgatgcatgtttggatagtctctctagagtgcttgaccgatgtattagtactaaccttgttcttaactttgagaaatgccatttcatggtgcatgagggtatagtcctaggacatttggtctccagtagaggtattgaggtcgataaggcaaaaattgatgtgattacctctttgccttaccccgcttctgtgcgggaagtacgttccttccttggacatgcaggtttttataggagattcatttaggatttcagtaagattgcattgccattgtccaagcttctccaaaaggacgtagactttacatttgaccagccttgcaaagaggcatttgagggattgaggaagaagctgactacctctcccatcatgcagccgccaaattgggagcttccctttgagctcatgtgtgatgcctctaattatgcacttagggctgtgttgtcacaaagagttggtaaactatcccatgttattgcttatgcttcacgcactttggatgcagcccaagttaactataccaccactgagaaggagcttttggctattgtttttgctttagataaatttagatcttacttgctttgctcccatatcactgtctttactaaccatgcagctttgaaatacctgttgaagaagcctgatgctaaacctagattgatcaggtggatgcttcttcttcaggaatttgacattgagattaaggacaaaagtggtgcataaaacttggttgctgatcacttgagtagaattgagggacctcttgagtcctttcccattcgtgataattttcctgatgagcattcgatgcatttgcattcatcgcatgtcacaccttggtttactgacatttttaatttccttgttgcatctgttgttccacctcatgcatctaggtcccaaatagataaacttaagagtgatgctaaatattatgtttggggtgatccttatttgtggaggtttggtagtgaccaagtgatccgaaggtgtgtgcctgatcatgaaattcagtctattcttcagttttgtcatggcacagctatcggaggtcattttgttcccagaggaccactaggaaagtattagactgtgggttcttttggcccaccttgtttagtgatgctcatcactttaccaccacttatgagcagtgtgagagagcaggaggcacaattacacacagacaagagatgcctcagcaacccattattttttgtgagattttttatgtttggggtattgattttatgggtccatttcctgtttctcatggttttttttatatattttgcttgatgttgattatgtttctagatgggttgaggctaaggtcaccagacctaatgattctaaagttgttgtggattttgtgagatccaacattttttgcaggtttggtgtgcctagagccattatcagtgaccaggggagccatttttgtaactagtcattcgcatccttgctttagaagtatgggattgtgcataaagttgctacaacttatcatcccaaaactaatgggcaagcagaggtttttaacagagagatcaagcaagtgttacagaaggtggtgcaaccaaacaggaaagattggggtaaacttccttgctttatggatgtatccctatagggtggtttttggtaaggcataccaccttccagtggagattgagcaccgtgcttattgggaggtgaagagttgcaatatgtcatttgatgaagcgggtatgcaaaggaagcttcagttgcaagagcttgaggagattcgtttagaagcctatgagaactccaagatttacaaggagaaagtgaagaaattccatgactctaggattcttagaaaggaattccatagtggccaaaaagtgttattatttaactctcgccttaagcttatttctggtaaacttctatctagatgggatggaccttttgttattactaatgtttttccccatggtgcaattgagattaaaaatgaagctaccggcaaagtcttcaaggtcaatggtcaccaactcaaagcatttcatgagagccctcgagtggacgagaagcttgtggaggacatctctttggtcatgccaattttgcgtgaatgacattttggggagtttccttttcccttcttttatttgttgtctctttgtttgcatttctttgcatgcctacattgaggacaatgtgcatttcaagtggggggtgaaggatcctaaaatttttttaaactctagttattttctgttttctgttttctgtctgtttatgttttgttgttgtctgcttgtcagtgtctgttggtttctattttctatttatctgtctgtctacattctatttgtctgttttagttgttgattttgtatgattttgttgtttgtttctatttgctgtttctgttttgttgttgtttttattgaatttaggcactttttcatgtttttcatagtatttccaacttgtataaattgtgagaaatgttaaaagttggttggattgagaggtttcatacttgaagtgaatcattgttgcaattgttgaagtgataagtaggcttgagaaatagaatttaagatgaaccatgtgtggtagaattatgccttgtgagtttttgagcctttgtggatatgttctttcatgtgcgatttcacccttgtgctagattactctatgttttgtgaagtgttgcaaacatatcttgtttttagtataaattttaggatagattttaattaaatatgtaggaaatagaatagaattaggttagtttagtactttaattgccttgagctaatttcaataccatttaagcattttgcaggcaaaaaggaggaaactcaagcaaatgaagaagaaaaccaagtctgcagtcccgcgttatcagcgcgggatctcacgctatcagcgccagatgtagggaatgaaggctttggctcgaccagttcacgctattagcatgacatccacgccatcagcgtgagagaagcctagatcaagcctgaagactcgaagacctcacgctattagcatgaggatccacgccagtagcgccacacttttgaaagacccatgcgattagcgtggaatcgcgtggcattgattttatttcctgtttttaaagattggtttcgaaattaggcttagcttttggttttcttaccttaattaaacattgttatatatatgaggcttctgaacagagtctagtgcggagaacagcttattactccttagtctcatttacttagccatagatccacatcccaaaccctaggaatcaagagttgaagccaagtttctgcacaactatgaattattcagctgctttggtgttcttgaggcctatggcaggctaagctttgtattgtgggaaggtcatgaacttatgagttatcctctgtaatttgactgtattgaattcatatgttttgtttactttaattcttttctattcttaaactttatcttgtttagaattgatcactctagatgagtactgagagttataattcacaatgggaacgttgggattgtaatttctgacttgttaagaataacacttattcttcacctaggaatagggatgcgtgagtgcggagtctataatatgttctttacatgcttagactgatagatttcactaaggaattaggttttcaattcagtttaaagggttaattcactaaggaattagggattagttaatattgaaaagacttattctccgagtaatcataacacgaacccatatgatctattctctgtatgcttaatttgatagaatcgctaaaggtttagggttcttgatcgaattaaagggtgaaatcgttagttatctaggatttacgaatataggagagatatatcatatgcaaacttcaagctaacatgaccagttaagtgaaagaggtgatgcttataagggattgtgcctgaccacaattcttcatccatgggtaattcctcgaatcaatttactgcatattttcttacaattgtctttagttacacaatcaatcaacaattcacaacactttctgcgtattttctgttttaaatttcaatcatattattaactttgctgagaaattactccaatccctgtggatacgataactctacttacctgaactttattacttgtaaacgatcggtgcacttgccgtaatcgcacaacattttgccttgcctctgttgacattccttgttgcacatgctttgattgagatgatttaggccttctttcttttagccactagccaaataaacctatccttgtgttgatatccattgtcaccctctttgagcctttagccttttctttcttgtttagctcattaaaaactaaaaaaaaaatggaaaaccatatgttatcctagctttagggagaaaagggctttggaattgttttaggagtgggtttcaaacaagtgtggggtgtttgtcttttgttttgttttgaagtaaagaaaagaaaaagagaaaagaaagagttcaaatagcaaaagttcaaagaaagaaaaaaaattatgtataagcaaagaaaaagaagttcaagcaaagaaaaagaaatataaaagtttgtatggttcattttcatccttgtaaattcttttacatttcatcttattgcttctacctctcttttaacttgttggcttgctccccattgtccctcttttctcttaagccattcattacaagctaataaagtccttttgatcttttgatgcatgtgtatttcaagttgaatgaatgagaggcttgccaatgcttggatgtgctagttacatgtggtgtttgagtgtaaatacaagccatacacatcatgtgaggttgagtgtctccctttgagagaattctatcaccttggtgcattcttaatccgaaacttgattactttttcactttgcaatttgtgatcatgttttcatggattgtttgttacctcaatattattcttccatctttccatctctctcacttttgtgtattgttatgatccattgcaaaatatgtgtgccttgttcataccattctttaaatttttgatttactttagtctttctttttgttttgcctaggagtgcaaatgttcaagtgtggggtattttgataaagtgcttttagttaaatttgtgtctatcattcttagcttatttgacttctcttggacctttattatcctattctaattcagttttttgcttaggcaagtaagtgggcttaattgctagttgtagcatattttcggattcttgctcacataacgtatctgacttgtgcagcgcctatagagtgctatcgatatctgaatgtagtgttctaggagtccctggaaagataacgaaaagatctacaagtttgctacaaataccctgaggccaattctgtcatttggagggtcattttaaacttcaaaatcggaacctttgcacttgtaatttggctgcgagttttaattttgttggtgtaaatagtaaataattagattgttgggtttgtttatggcccattctgttttcagaacttagtcactatatatattagtgactttagtgaaacttggacaacactttacaattcaataaacaagttttatatttcttttctttagtttttagaatcaaaagcttgttcttcattttctctcatttgttcttcattgttcttcatcttcttcatttccattttgctagtcttccattttcttgcactcacttcatggggctttccttggtgatcatcatggaaggctaaatcatcaatcaatccaagtatccaaatcaagcaagagaagaattggagttgcagtttagtatttcgaattctatttgaatattcaccttcttcttcaatttctattaagttttcatgattatgaatgcatttaggattgaaagcgagttagaattatggattcatgtcctaatttcgaatgataatcacaaaattaattgaatgatatttcagttagggttgtggtttcaattaatttaggagtagaatcgattgaactgcttctattgagattgaatgaatgttcatgatagaatcaacttatgagaatgatgatgattcgaatagcttggtttggtgaattggattgatgctttctaatctgttttactttactccttgataatcttgttaatttctgcattgttctttaattttagtttgtgttcttacatgttttactttgcgcataccaactgttcgaaaaaatcccctcttattattaccaatgatttgaagctagaaccatattgatcgtgtctttgagtcgacctaggttaatcctatgctacaaaattagcttagttaaattgtttttggtgcgtctcgacaacgcaatatcacatatatgttccttttaaataaaatcatataaactggaataaattaataattcaaatgaaaggcttattccaattattgtttggatgaattgggcaagcacttcctgcttccactggacgaggtactcattattggataagtctcacctaatgttgcctctagtcatcaaacccatttgactaacatgaaacataatggttagcaaaaatgtatatctttgttttcgtcaaaaccttagatctgtctaggtcatttagtgtataacaatctgcccttttttatgatgtcaaactatataaattttgagaaatgaatatttatggaggtccattacaagctcaaggccaaggagaagaacttgaagagcttcctttggttagctttagaggatctatgacaagagctagaactcaaacccttcaagagtacatcaaaattaatttgcacctcttagacaagcatgaagaagcacaccaactcaagaagaacaagggactgattttgtattctcaagttgaatttaattccagcacttatagtggcaattgtagtgcaataaataggcttgtagtggcaattgtttaataagtgtaggtgcacttgtaagtatttttttagcacctatgtaagcttgtaaaaactgtagttgcacgtggctgactcagccatgagtcattacatgaatagcttgcacctcaagcttcatttcatttgtcatttccttctacttgcatttagcttacatctttagctttggtagcttacaagacaagctttaagactttggctatataaagctagctccaatgaaatgtaaacaactttttggtaaattaatagaaatctgaaatttcttgtgagattttctctcttgttcttctacaagaacttcttggatcttatcaatggcttgattctttggattcattgacgccacttctttctccaattttcgagtaagagtttgagttcttgaagagttcttgaagattgagtttcattgcaaggtagattgggaaatccaatgtctgatgaggttaggcatacatcaaatatagtaggtatatatcataatagttttagtataaatgactcattcaaaacaccttattttattaattgactggtgttttacataaaaaaaattatttcataaaattctgcccctattgtcattagcaaaaagacaatgggtttgacagtgaaagaagtgatggaggacatcattgctgatcttgtgtgagtggtggtggtggttgggatggtaatgggtggtttggtggtggtggaatatcagagtgaggagatggtgccagaagtgtttgggtaattgtaacaccccgtaggcctccgacgtgttatcattaataatatcagtttaacgtttaaaacatagtttataaaactcagcggaagcacagaatcgcttttcttgatacattatgtatgaaacaacatcaactcatcaaagtcacacacaaagcataaaagcacacccctgctgatccagtttctcataacacataaaccatacagacagatatctatcagaaataggcagatatatcactataccacagctatactcgggagaatatgtctcataaacatataagaaatagttctgtacaaatatatacatcagtactcacacctcatcgggtgatacaaaagaatatcagccctcacagggtatacagaactatacaaatcatcaggagtacacacactccatcccttctcaagggtaccatatataaacaaaataatccaaaactgagcctacacgctccatctgctgccatcagccaagcagaaacgtctctactcgggcctcctgccctgagactgctttcttcgtccggaagagtcacctgaaaagcataatcccccacacggggtgagataacaaatctcagtaagctcagggtccatggaggcttctcctccaccctggcccactttcataacacatacatcaggcaatcacaagcaaatggcccactggcctggccctctggccctcataacaacataagcatagcatacaaacatggcggagctgcctcaacgcctggcggagctacctcaacgcctgtatcagtgggagtccgaaactcgcacctgtgccatcccattgggtgctaacccttcgcatggatgcacaacatatggcacctccaagaatagaaggagctacctcaacttctaatcccctggcctgtgggagtcaatcccctgggagctacctcaaccaagagccagccatgctaggaggaaaaccatctcctagggaggtccatatctatctattggccaacagatctatcacaatcatatcacagtacaaaatcaagcacatatgcatacatacatcattatgaggatgcaactaccaatgcatgcatcatgaaatgaccaccactcccccggagtgtggtgtggcacacaagatgggaactcattccccagggacactgaacttacctggtaaggtctcagtcagcaattccttcccaggtctgtggctcccgccacccaacgtctcagaatcaatgcctaaccaaggcatattcaatttcatatcaaaaccagaccacagacatgaaattcacaatacatatatatatatatttacatcatacagaaatcccctatcctagggttcaagccaactcagcctacactaggctgttctaagaccactcaaggtccatcaggatggaatacaatccatctgagtcattctagactcgccgcacatatacataactaagccttactcagcctcacaattcaattgttatcagaaaggggctgaggtccattcaaagccctgctctactagcctctcagctcagagcatcacaatcaaggctctagcctatcagagaaccatcaacaagtgactctacataagtcacacaggcatatacagagccaagattcaaagttatcagaatcaaaaactgaaagctaatccttcatctattctaagccctgaacaactttctcaactggaccctgacctaattctagccccagctcatatgggtcactattcacagggacccccaaaatcaaaattaaatggtgaaacttgcgtttcttacctcagtggcgactccaacaacctcagaacagcttctcctagcttctatgttccaattacgctgtggttcttcgccaagctcgagttctctgagcttttccctctaaggttcctcttctcactcaaattggggttttcaaggaatttgatgaaggattcaagctttctaatcggttcaatcaagattctaaggctcaggcaagtgtttaggctgagaaatcaagtcctaagaagctttaggacttcaacaatggaggttggctaaagggaggaagaagaaatggtttttccttccatttctaacgttttggcctttaaattctaatctgccgacgttcccacgcgactcacttgaactcccacgcgactcacttgggatggcagacagaaataccatttctaagccacttcccacgcgactcgcgtcgtttttccacgcgactcgcgccattcgttcgggccttccacgcgacccgcgtggatcccaagtgactcgcgtggagccccagaggaaaccatgatttctggaccacttgccacgcgactcgcgtggatcttcaagtgactcgcgtgacatggcagagccatctgccccatattacccatatggcgcgggtcgcgccgcaccccaagtgggtcgcgccatatgccagaacaatccataaacttgcatttttaagcatctttcagaggattctaaagcatgatcatattccttaacccaaaaacttagattcatgcttaaactaagcttaaacatatgcttacgaattcacgctattacatttggcgccatcagcgccaatcctggcgccaccggcgccgcacccttagcagggttttctgacctgaatccccgcgcgatcgcgcggggttatgcgccgaaaataaaagtccttacagtaatggttgtttgtggtggaggatcatggataagtgtttgggtaggggttggaaaactgggtggaacatttactggtggttgagattgggtggttgcgagtggcattggagtagcaacaacaacactgaacaaacgcatcttggcctattgtagatttagaatgaccaaggctactaaagtgagtagcattagcttgttgcatggtgcatctgaactttttattctcagcctttttcttctcagcaaagttgtccatagccagtccaatcatctcttttactttagctttagtcactacttctagaggagcaaaattgattgaagtgggtcaaaagatatatgggcagtgacaacagttgtgtctttagatgtcgcttcatgtggctctcttcctcctctatatcttaggtctcctttacctcctcagacttggactgaggcctaataagtgccacatttcagttaaattcatgtttcaaatactggcacttatcttttgattttattaacttggcttataaattttccctaaacctagttaaaaagagcctaatacttgtgttaaagttgttttggaagattaatccaatcatgtcttgtattttgatagattctgtggatttccgaagcttccaaataagcaaagcaagcaagaaaggcttatataacaagaataggaggtgcaacaagcatttcaggcccaaaaatcgacatggcccaaagctttcttcaacattaagactttaactcgcccaggcgaccatccatagtgcatttggcttgtccaggcgagctacaagtaccaagaagatatgttaagctcgccaggcaaccaaaccatgaagaaaatggtggcctgggcgagtgaagcaggtaagaggcacatttctataaatggccacggatttggagagaaaaattcattcttttgcatgttttttcttcttctttcttgcttaggcttgttcctaggtttagaaggttacatagtagtattaggtaggttaggaaagtgagagaagtgagaattagtgtggagactctgctggaaagaggcgatgacaaatttcttcatcaattcttctcttgaggaggttgtctcaatgcttggctagcttttctaaggattggatgtaatcttcttaaccctatatctcttttaatatttatgcatgaatcattttatttcttgttggtaatttcattctgtgcttaatgcttgattctacttgatcactagtatcatgaacttaaatcctaagtgagactggaaagtaatattagggtttgaactgaatgaatttactcattacgttacgttgctaggaatagggcataacgttttgcttgcataaaagcaagtgaatgtagttcttaacgctggggtatttacttcatatgcgagggattgatattcggtaaatattcttagaacttgaatgcgagggatcgattcaagataaactagtgtgcatcaataaggatagacgttgatttatgcatgataatattaattggatataaatggttaagagcgatgaaatccaatcccgctttctcataagtatattttcattttactaagtttacattacttgcactactaaatgaaattccgctcaacctacttgtacataactattgaactatttaattctatttggattaactgagtgagctcaagtccctatggagacgatcttataaattttgaaacttacaatgacaaatcggtgcgcttgccaaaaaattacctaacaaggccttatcccaaccctaaccttcaatctcttctcacttctaataaggtcagtgagaagaggtaaggatctcttggcagacctattgaatatagggggagcattatgaagaatagaagaatttgattcaagctttggttttgagctttcaacatgcttggatgctttgaagattaaaattgattcaagtgtaagagaaagtttaatctggtgatccatattatgcactcattcattcattcatttacttaaatgtttttgaaagaaaataacaaagattttctaatttggttaaattttcaattcaagtgaaagggttttggaaaaatgttaagtttcactggattaatcgattacttaatgtaataatcgattaatatgttctttgttaaatctggaaaatattttatgaacattgtaattgattacctatcgggataatcgattatttgatatttgtttggaataaaactgctttgttaatgaacttaatcgattacttaaggatcttaatcgattacatagtatgtcatgtttttaagtcttgttgtgatagtcgattaccatagattgtaattgattacttaggctttatatggaaaatcactttgttgttttaatcgattaccaaagattgtaatcgattacacactcaatttggaaatatacgttttctgctttaatcgattacaaaatagtttaatcaattacatagtgtaatttgtaacttttagaacttctattttaatcgattacagctcgggataatcgattattttgctcattgcaaatcccagaattattttttgaacagattaatcgattacagagttattataattgattacataagataaataatcaattattaggcacgtttaatcgattacagttaattacaaattctgttataaataggaatggaggttgagcttattttacaacttgttaattcgtatatttgaatatacacaagcctgtcaagctattcctaagtgtttttacttcttgcttcttcaaagcatcaattggtatttgaatgattcttgagcaagattgttttcaagattaaggagaagtatgttctgagtttgatttcttcttaacctgatttggtaattcatatgcattcattcattggatcatcaggttatctctctccttaattgttgtgtgtaaatttcgttctaaatttctatgtaagattactattgtaaagtgggttcttgcttgtatctagagaagggttctctagtgtaaagaacatagtagtgttctctggttctttgtctcttagaatcgaatagtgttttagatttctgatctttatctagggttgataaaggggagatgttgtaactgcatataagaactagaaattttataatagtggaactctaacctagtattggttggaagaaactggatgtagcttcatgttttgaagtgaactagtatacattgcttgtgtctttgtttctgtatctcaattctcattttattcattgatctttaattctttgattaatattcattgttcaacaagtgcagtttttgatctattgaattcttgggctgagacatttgattgagtaaattgatttcttggttttgaaagtgataaaaatcctgaaactctgattttaatttgattttaaaataccaaggttaaaccaattcacctccctcttggtttttgtgaagtattcctattattttcaagatctactaccttttttttctttcttttttttttcttctcctttttctcctccttcttcttcttctacttgttctaaacacccttatgatcagaacaggtgcaagctttctccatcccaggttgggggttcaacttgaaagctgcaagattcttctacccccaagtcatcacctcatcatccctagcttcatcatctagagacactccaaaatgcctaaagaccaatgtcatcaacattccataaggcacattagaggttgacttgatgggcttgcttgccttgatcagatggggtaggctgagaggaatcttcctccaaaggaagtaaatcattagaagatcatggtcattaacttcttgtaaaggtccaacccttggaaatagaaaatgcatgaaaatgtagtggacaatcctcaaaaaggatgtcaaagacatggatttaaaatcatcatccttatcctccaaaaactttttcattattttggtctttctgaggaacatgatgtcaaaccaatcgtcatagagcctagagatatcagcaggaactcccaaaatacctgctaagagttgttttgaaatcagaatctcaattcctttcaaggcggccttctaagtgaagttgttgctatccaccacaacaactataaagaaggatctcaccaaccttgtgtagacatgttcattcactttaaagaactttgtccacttctacttcttcacaaaccacataatctcctagatacattctttgatctccaaaatatcaatatatctcccattgacaaacttctcttgttgatttaactactgtcaaattgcttcttcaacttcctatcacaaaataaggaagtaaccttgtatctgaccttctcatattcttccttgatttatctgtcttcctagagcttttcgtctttggtgaccctagcacaacacctttggaacgagggggtgtgatggtcacagtagcatttgaatctgacccagaggacacttctattgccttggctttccccttatctaggtgggttattggagagtgcgagtgagaagtataacttctagggtacaggagtaagaggggttttttactcttgtagatttggttctagccatttgtgagtaggtttgagagcacaaaacaacaaaagagagaaaaagaatatagaggttaaagaagaaagtaaaagagagaggggaagagtgaaataagtttttactaacccctttcttatataaaggacccaaggacaaagagaaaataaaaaccaaaaaatgtaaattttaaatggaaaaaacagaaaatgaaaaactagccattcttccccataacggttagatttaccataaatgcacgtgttcaaggaatcaacaagaatacccaatttggtcaaccaaaacaaggcacaacaaattcaacaaaatgtcaaacacccaagcatggatttcatttaatcaagaatttaagcacaaaatcacatgcccagttagagaccagtcaagcatttgacattaattaaagacttaataaaattaaacttgtcgtcaattagagttttggtgagagtatcagcaggttgaagctttgttttaatgaattttagctcaatatttccattatgagcatgatttctaataaaatgctattttgtatctatgtgcttggaccttgaatgttgggtaggattctttgacaaatttattgaactcgtgttgtcacatcaaatgaaaatctttgtatatttcagtcagtaatccaacatttgttacttgatctagataatttgtgaacaacaagcagctgttgagacatactcaacttttgaggttgataaggcaattgtgttgtgtttcttttaagaccataataatagtgactttccaaggaattggcaagcaccactggtgctcaaactcagaccctttctcaaaccaaaggccatgattagtggttccaaataaatatctcataattcttttaactgaagtaatatgagatacctttgggcaagattgaaatcttgcacaaagatgcacaacaaatacaatgtctggtgtattagcagttaaatataatagggaaccaatcatacctttgtactccttttcagacgtatcataacctttctcatccttgtcaatgatggttgtaacgacccgcctcgtcgctacgatatcactactctaaatgaaaactgttgcgtacttgacaagtgcatcggtcgctcaagtaataaagtgataagagagttatcgttcccatgaggattgtttgaccaattagattataaattgaatctataagttggatgacaaaaggtatgagagaaatatgtgtggacaaagtaaatgtaaaagctaaatataaacataaagtatatacacaagatagatgatggttgtaccaaacgtaagctaatgtagctagggagacccacaccccatgctcctgacattcttacatggatcgtttactacattcatctatactagctactcaatcatgcatcctcattcaataatagttaagccctaatccgttagtgacattaacctataacccttttcaataccctaatcccttagtggcatttattaggttaagcattaagtgatgcattacaaaggattgcaagcatacatcactatccataggtgatgtaaagcaagtcaccacacttagttccaagactaaagccccaatatccctattgtgaaccctagctctaagctcttacctagattgatcaggtctaagaaagagatgaagagattcaagcaaagagtaatgaaataacatagcataaaggaataataacattcaatccattccaaatgagatttacatagagagtttgccctaactacaaaaggaaactagccaaacctagacatggatggccttggtacaacaaaaagaagcatgatgttgatatatacaaggaagaagaggaagggaagagggaaaaacccttttcccctcacacccaaaccctagctcagctcccaagccttctttctcctcctttggtagtgatattcgtccaaaagatcctctccaatgctgaggcttcagttatttatagtgtagcccatgaaatctctgttttgccctcattatgcagactctgcgacctgtggtgctcctggcgccaactccacgctgacggcgccaacatccagaaggaaccgcgctcctggcgcaggcacaacactgatggcgctggttgaagaaaccgtggcgcgagcctggcgctctaggcgccagattctagagatggtggcgcggatcgcgtggtacaggcgcggatagcgccaaaccttctgctctgcataattcttagctaattcacctgctattcattcaatcttgaccaaaatacctcattgaagcacataagttacattcacaccaattggaagttatttatcatataaaatgatgcatttaacgatctaattgagcttggaaagcataatatgctaggcacatatcaaataattcccatatttgaacattattgtcctcagcaataacaaagatcttgaacaagggatcaaggacagacattcaatcctaacatcacagaagaaatcatagaatccaaaattgctattcataactgagcttttgtattgaacatcaacaatgcttttcaatttcatcacaaaacataatccagcttgaacaccctcaccagataaaattcactcatccctcaagtgtctagggtgcaatcaagattactctctatctctacagccataacactgccataagcttgaccatattctcaattttcctaaaaaaagacaacacatgcacacttgatcaaaaggactttcagggttgtaacttggcttggctaaagggtggatatatttggaaagtgactaaataattgttgagattgaaatatcatcaactttcccattcattcaggtttccattctaaacttcatccactacctctttttagcattttctttttcttttgtacttcccttttcatttttgtgttttccctttttctttcatttcatttcagaccatcttttgatttttctttctaacacttttcacctgaatacttttctttttatccacatatcatatttgcattccaatctcaaccagggtgaggttatgatagtggtttacaacaattctttatcaggtgtttgaacaattaggtcttaagctcaaggggctagcaaaggatcattatttccagggaaggctatttcgctcaagcttaaaagaataaaattgcctttatcacatcatgtatgcatgcatcagagcgaaacagaacaaattctagagtgttactactgtgagaactctctaaaaagaaaaattttctgtataggcacaattttctcacaggctatagtgtcaagctagatttgttgattcaaaatcaaacatcatatccattctaacaatcactcagtcatgcgataattccagattccatccatgtttcatgcaacgtaattctcaaatgttcttatcacaattttccctattcttaatcaagttttcattgattcagcttcgtaaatctgggccatgcttttatcaaaagtgtctaatatgtactcctatagtttaagttaggaattagacagtaagttacttatccacaaaaagaatttctgaccccaaaaagaatttcagacgtcctttgttctcaacatcactgatttcctcaattaacacatacccccaattcccagatttaacatttgctgtccccagcaaataattaatagccaggtattgaaagaaacaaaataagtaggcgttatttgaggacacaagataacacggaacatcagtctagtaattatcccaaaatatgtaccaaggttcaatgcaaacatcaacaaaaactgataaataaaaacaaaagataattctaaaatgcagaaaccaaagtaaacctaaataaaacactggaacagtaaataaaatgcagtagcaacattactcttcagccataaggcatttggtgctagtgggggctcaactcttttttcttctttcccttgtcaacttgcttgccctgaaagtcaaaaaccaaagtccaagataccgtatgttcagcaaatctacacacagttcatggcctaatcagtggacaatggcaattccaagatttagaataaactatatcagggtagaattgacttcaaggatgccttaacagttcatctaacattataaacactggctacaagttggacaagtaaaaaggcatcaaacacaacaacgagtgaacacgcagccacacagttaacgcgtttgtgcatactcagaccaatgctgtcattcccagatttagttgaaatcatatagtgaacaataagatgtacaagcattcctgatgatatcaactattgaactacaaacaaggaaccacatgactgatgaacaagaaacttcaagttcaggatataaacatccacgattaaaccaacaagtgcacagatcaaattgatcaattacaccttcaacaagaaatcctaaacttgaattcaacaataacttacaccagcgttagagcaagcaaaatagattccttgattgaagcacattgaggcaataagaataaaccatattaaaatgtaatgcctagacatgtgctcaacaaaatagttctgagatgtcacagtgcaaagcaagtgtaaaattgatttcaaacacaatttcacaacaaaacctctcaaaagatgctattctatctaagcattcgaggccatctcagaatcacaagaagcatcatcagagaacaacaacattgaactgtcctaattcaagccaattcgcagatttatccaagcaacattactatgcattggaaactaacaaacataaacaagaatataaacaaaaacaaataagcacagatacagaacacaaggatgtcctccatgagttcatcctcaggtctttatttgttccctattctctcagtagtatctagttcctcttcttgttcttcttctggtggtgatctggaactagatacctctgcttccttccttcgtttcgccaacttccaggtcctcttaacaaggattcatgggtcagcggtacctcgcataaactcgggaagcaggttagtaacaaaataaatccaaccttaaagataaaaatttataatgaaattggctaaaacaatccccgacaacggcgccaaaaacttgttgcgtactcgacaagtgcacgggtcgctcaagtaataaagtgataagagagttatcgttcccacgaggattgtttgaccaattagattataaattgaatctataagttggatgacaaaaggtatgagagaaatgtgtgaggacaaagtaaatgtaaaagctaaatataaacataaattatatatacaagatagatgatggttgtaccaaacgtaagctaatgtagctagggagacccacaccccatgctcctgacattcttacatggatcgtttactacattcatctatactagctactcaatcatgcatcctcattcaataatagttaagccctaatcccttagtgacattaacctataacccttttcaataccctaatcccttagtggcatttattaggttaagcattaagtgatgcactagaaaggattgcaagcatacatccctatccctaggtgatgtaaagcaagtcacaacactcagttccaagactaaagtcccaatatccctattgtgaaccctagctctaagctcttacctagatcgatcaggtctaagaaagagatgaagagattcaagcaaagtgtaatgaaataacatagcataaaggaataataacattcaatccattccaaatgagatttacatagagagtttgccctaactacaaaaggaaactagccaaacctagacatggatggccttggtacaacataaagaagcatgatgctgatatatacagggaagaagaggaaaaccctagctcagctcccaagccttctttctcctcctttggtagtgattttggtccaaaagatcctctccaatgctgaggctccagttatttatagtgtagcccgtgaaatctctgttttgccctcattatgcagactctgcgacctgtggcgctcctggcgccaactcggtgctgacggcgccaacatccagaaggaaccgcgctcctggcgaggggcagggcgctgatggcactggctgaagaaacggtggcgcagatggcgcgagcctggctctccaggcgccagattccagagatggtggcgcggatcgcgtggtattggcgcggatagcggcagaccttctgctctgcataattcttagctaattcacctgctattcattcaatcttgaccaaaatacctcattgaagcacataagttacattcacaccaattggaagctatttatcatataaaatgatgcatttaacgatctaattgagcttggaaagcatcatatgctaggcacatatcaaaaactcacaaatatgattttcaatttttaaatgaaaactctattaatttgattatgaaaatgagggtaaattttttgcgatgatacactcaccaaaaaacgcacaaatatgtaaataaatacatatatatgtaaattttaaaccattacatatcattcacatgtcagatcataatttagtttttacatatatgtaagtctggaatttacatgcccgatcaaaagaatcaaggaaccaactaagaaagagttgataacaaaacacaactttctcccaaaataaattccaacattatcacgtcggtttggcagctccaacaaaaggatttccctccaacatcacctactgctgctcatctgctcccacgaacgaaggttcgcgatcataacaggtacaaccacacaatacaaaattgctagggtgaatttattatacaagatcaacaagcaccaaatgataatgattagcaagaaaaacataataataaccacaattattctcaataatcaatcagttcaacatatactcaacaaactagtgattaactttttccataattcaaatcaattatactcagaatgatgcatgcacctaactaaaatcttaaatgcaatgtggtaccattcgtcaggaaatagcctacgcatgccctcatgacactttcacttaggaaaatgatgcagtaattggtcgaggtcaccttgtcatgcaatggcaattgcccccccccccccaatggtgatgagcctgagtctcaaggaagtttcaaattgagtgatatgcccccaagtacccgcattttttcctcatggaaaaccacaggtatttactaccaccatttatactatttccatgcaattatgaaatatgagacatgggcaccatcaatgcactgatcatggatagttaaaaattctaagcaatcattttccctctccagggatgcttaaaattcttaaatcaatcttcttccctctcttgggatatccagtagatcactgcaaccccatgtacatacacaacatacatccatcacaaagacatcatcaacatcaacatcatctctgatcaatgtcatcatcaacatcaacatcatctcatattaatataatcataccataatctcatttcaatattatcaacatcacaagtaatcgcattccacaggtatacatataacacatgtctgggattcacattccctaggtctttagacaacacaaatctcatacattcaccatccataataccacaagactgatattttatgaaatttctaaattaaagaggaaaactataatatacaaaccaaacccatgcatatttcaaatttaaaaaagaagtaaataggagaaaaaaatataaattttgggcaaagtctcctctgtaattaagaatttttccaaaaacaatctaatcattacaacaaaaacatcattcacaatttcattcatcaacaacaaatatattgcatcccattagtttaaaacacaatttttcttaaagaccaatagggacaaacatacatcctcataattgggttccctgaccccaactatggtatcaaaagctataaaacaaacataaactcccctcaccgatctatatccatttgttaactccttatagcgtcattttgagatctctcaggttcacgtcctttggtccaaacacagagctttatataccaaatcaaacataattcagtatagattttgaagacaaggttaatattaacactcagggtcaaatacccataaaaaattaaaaggggataaaatgatgtttgtatagtctgcatcaaagagatgtcattttgaaattttgatcacaccaatgtgaccgaggtcaacgaaggtcacgaaaatgacatcaatattataaaaattgaatctttacaacatttgatttttcaaaggcagtgtaaaaacatccaataacggcacccaagtcacaaaagatactaagagaggttcaaactagctaggagaaggcatagaaaacaagattacctcaaagaaactgtgaagggaggattggaggctccgttctctactgaatcctcgagttgatgtttgaagattcagcttcgattaaagtgtttctctctgtgttgtggtccaacggcaagcaacgacggctcatggcagtcatcaatggccgtgggtggtggaagaagaggattggaggcttaggtgagtgttttgaataagaaggagggtgaaataagtggtttttcactgtacgtttttgtagccgtcatgggtggtggaagaagaggattggaggcttaggtgagtgttttgaataagaaggagggtgaaataagtggtttttcactgtacatttttgaagccgacaatactcgcctgggagaaattctactcgcttgagcaaactgacccagttttaaataatttcgctgcttctttgaaaagcttatatctcacgctccaaaagttattttgaaaatcccaacggtcaacatttgcatacatgggttttgacctacatttaaaactagaaggtggtccgacggtcaaccaatccgggatagtgattttacagaaacagattttgggtcaaactttgaataaggataatttggacaacacttcaactaatccaaattaatatagtaattaaataatacaataaatacatcaaacatacattttcaattatcgaaaattcggggggttacaatggtggatggatgcataggggaagtcgttgatcttcttcatccattttgaacctctttagaaggtccttggtgtatttgtcttgatggatgaatattccatcatctttttgaatgattttaagtcccaaaaagaactttagctaacccatcatgcacattaaaaattctcctttcattagctaagaaaactcctggcacatcatttccaaggttgcaaaaaagatgatattgatgtgttgcaaacacatcttgtttttagtctagttttaggttagaatttgattaaatacttaggtaaatagcttagaattagttgagtttagtattttattgtttaaatctaatttcaataccaattgtgcaatttcaggtcaaaagaggagaataaacaataaaagaagcaagttctggagtgtcacgcgtgtcgcgccattactcgcgcgagtcgcgtagaagacccgaggatatcacgtaggtagcgccgttattcaagtggatcgcgtgggaacttcaagatttaagccttttaactctgccacttcacgcgacatacttggttatcacgcgggtcgcgtgaagactcaaagcaataagcaattaccttctgtcacttcacgcgaggcacttcacacttcacgcgacacgcgtcattcctttctgccagtccacgcgactcgcgtggtatcgcgcgcgggtcgcgtgaggttgaaacagtttccttatttaaatcatatatttcaagatttggtattatattaggattagttgccttaattaagtgattctataaatatatgtagattccttaattaagaagatttgatttagatttggaacagaaaataggccttgttaccttaattagatctatctataaataaaggcctctgggggggttctagacacatccattatctcacatctctaatcatcccaccattaccttctatcatccattctactctctccttctcatattttcaccattggaagtcaagaatcaaggcaaggtcaatcaagaatgtcttatgtgatagcttttggtttcttgaagcctatggcaggctgaacttgtattgtgggaaggccatgaactgatgtaactcctctgtaacttgaattggtattggttttaatgctgttttgattatattattctactctgtgctatttaatgttttattcttatctggaattggccattctatttaagtattgagggttagaattcgcaatggacacgttggggttctaatttctgacatgtttagaataatagttgttcttcgcctagacatagggatgcatggctacggattttataatattttctttttcatgcttaacttaatagaattcaccaagaaattgggtttttgaattgggttaaagggttgattcactaagacattagggattaactaacttaggaaagatttattctccgaataatcttaacaagatcacatgagatatattctttgaatacttagtttgacagattcactaagggtttaggtttctcgatcgaactaatgggttaaatcgctggttatgactctagtagttctaggatttacgaatttaggaaagatttatcatgtgtgtgacttaagataataaaccaatcaagtgaaggaggtagagacaaaagggattgtgcctaaccacaattgtttcttccattggtaacttctttatctttttacttattttaatttctgattttattcaaacaccaaccacaactcaacaattacttctttgttctttatttttctgttattaattccaatcatttagaattaatattattgtgaaaattaccccaatccctgtggagacgataactctacttacctacttttattacttgttaacgatcggtgcacttgccgtattcattcgcataaatcgcacaatcgcgttagcgcgcaacaagtttttggcgccgttgccggggattggttaacggatttttacagtaatttttaattttagtgattggaatttttgttactaattgcttctccaagttttatgcgaggtttagtcaattctgaggacttgcagttcgatcccgaaatagaaagaaccatctgaagaagactagccatacaaagaagaagaagagaagctgagaattttgactttgattcgattcccgaatttgagttagagtcagaaatagagatggctgaagaagaaagaaacaatcagcccccaccaaggacaagacctgaggatgaacttatggaggatattctgactcctatgttcacaaggcctaactccagtattgtaaggccaccaattcaagctaatcattttgacattaatccttcattgatagtattggtggaacgcagtcaatttggaggagaagattcggaagacccacatgattttatagacaaatttcttagaatctgtaataccattagacatcaaggagtctccgacgatgcggtaagattgagtttatttccctttgctgtcaagggaaatgcattgagatggttaaactgtcaaacaccaaatagcatctcaacatgggaagatctggttacaaggttcttcgctgaatatttttccatggaaaaatacaaccgcttggtgaatgaaatcaccaacttcacacaaaacggaagagagtccttatgcgctgcatggaatagatttcaagagttgataaggagatgtccacagtatgatatgcctgtaggtaagcaggtaaggatattctttaatggtataactcctgaaactcgaatgattgttaatgttgcagcgggaggcacaattagatcaaagacagcagctcaaacttatgagctaattaaatctttggcttgcactgaaaacgtaagcagcaccattcagccaaagagagaactaatacaattaggcagcactaatgccatgcttgcggagcagaaaattttagcccaacagttggctaaattgaatgaaaagattgatagacttcaagtctctgcagcacaagtttcagccagcaaaccgcgtgttaattatgagtattgccaaggtgagcattgtaatgcctcactttgctctctcgtgtttgattgattttaatttaaaaactcgtgtccactttgtgttaaaattagattagtataaatttttcacgaaatttcttttcgcattgcttgctaattttaatagttgtcagtaacataaacgatattcctcacctcgttttatgcaaataaaattcattaatacatattgatttattaacagtccaggtacagtccaactagttttgtacagacagcgtattacaacacagcgtggcaccaaatacagacaaacagaaaatcacaagcacagcataaagtacatccagcttctttgtctacagctcatgctatcctgtttctctgctcgcccaaacgaattggggtcatcacaggtgtcaaccacagacacaactcgggtaagtattttaataaacatgatcagataatcgttaggaaacgaacaacatattagtctcttaacagaattaaattaaacagcagatatgtagtatcataaaataacatttataagacagatatatgatgaatgatgcttggtttctttattaaatgatgcatgactgagatctcagcttctcataaaatcaacatcagtggccacagtcagatagccccaatcactggtccagaacttgcatgatcagtcagggtgtcacagtggtgcacaggaaagtcacccacacttcatgtgatcatcatgggtggcatgagttcctcactgccgaagcaccccccagctcagacttctcactgtctgaacgctcatactcagttcctctaactatctgacacatatctccacgaattaacccccgcaaggcatcaacaccacggattaacccccgccaggcatatgcatatgaaaaatgcatgaatggtttaattattcttctttatcatttatttcaattttatatcaactaattccacccactccagtggaatacatatcagatagtcccacccgctccagtggaacataaaataatcagtagtttattcttaaatcatttttgttacagaatctcaacaaagcccatcatcaagtgaatgttcacatatcatacagctaaatcagcgacccaattaaatacaacatcttagatacatcaccacaacatgcagccacacaatcaacaaataatatcttaacagacagccaaaataacagacaacaacatcaaaacagacaacaattaatatctttacagatagcaaaataaaatttaaacagcatcataaaaatagacagcaacccattaaaatatacagcattaattaaaatgctcagcaactaactaaaatatacagcagctaaatatacagccacatatacaacagcaacataacagcatacgtcatccagcttacgtcaacaactcaattaaatatagcaacagcaacatataatcttaattaaatacagcaaccttaaatttaaatacagacaaagattcttatggccaagaagtaagattaattattttgggcagccacttgtttattgggtaatcaaattatggactatttgctatcctagttcattgaggactttcaacaaacacatggtatgccaactttaatttttattaaacaaagaagaacatggctttaatcctaagagattggaggttgaattaacctaatcaactatctaattcatgcttattaagatactccccatacctttgttttttctcaaacttttagacagctccttgctcctgaggattggtggacagcttccccttttttttcttcttttaaagcttggttaatcatcatctaataaactaattccatgtagggtgtctaaaggttgatgttcttggtttatttttgagtataaggcatgatgaagagggttaaaaggagaagaatatatgacaccaagtgaagaattcacacggttatgcttggtttgttttgaaaatattttggacttgttttggagaagtgacaggcttgtacgtgcactcctggaccagccccccttacggtttccttctcctcacatgtataaaattttgcttcttaaaatgctatccaagccttgtaatccgtccacctcctttagcaagatttttgtgctaaaaatcttcctttactttacacttggttagcttttcattggccaattaatcacttgcttccaagtgtagttttcttgactattctaccgtgctcttgcttctttcttccacatactatttcaattttgtatagataattccattagcctttttattcctacggtagcatgcttgtttctagtaaaaatatcttttaaaccatagttatcctatctcttgatttctattggctagtcattcttttgactaagttcttgacttctccacactattcttcctttaatcttgaattacacgtacacttcaattggtaaggcatccatttggttcttcttttcctcccatccgtaggatgcctagcttggtgacaacaatctacaaatattttgtcttttactttccatttgcttttcattcattggctaatgtttcttttgaattttccaccttttccttgcctaatcttgtgttgtacgtacattttttagattataaggttattctacttattttgggtttccatacgtaagatgccttgtgtttgtgaccaattttgctttcaaaaagattctaagcattaattactacttttacttggaccaatgacatggctaggttccttatccatccatgtgattattcttgacttttctacaagttttcctccattgatcttgcatcatatggtcaaaacctaacctagaattctaaataaattcaattttccttatataacacttaattctaatttcctattggttcattacttttaattagtaaaattactaaactatcatatttagacaacctattcctcccaaaattaagagaaaatttcatagattatatttatacttttcttataattttctgatacatgaggttgtctagattgagttcttttcagaatatctttcaaaatttctagaaatcacaatttagagttttctgtcatcaaccctattgttaatttgttgtcaaaaggcattttatccaatactcagatttctacaattttctgaagtcatctgggacatttttgacctaagggtattttagtaattttgccactggccctaggggcaaaatcgtcatttctaaaattgttcaaggtttctctgtatatatcgccctagggatgttctgatcatttttcaatcatcccagagttaaaatttccttcttcttaagatatcttgctagaatccctagggacaatttggtcatttgtacaaatctttaggggtattttggtcatttactgtcttagggacctatctgtcatttgagggattgttcaaggacattttggtcaatttctcctaaggatacattggtcatttctagaattgttcagggcaaatttgtcattttcgccctagggatatagacgtcatttctgaaattgttcaagggcattcttgtcattttgtcctaaatttttctactgcatttccttaacatttcactcttagtaattgtctgttattccctaaattttggggtgttacatttctcccctccttcaaaaaatttcgtcctcgaaatttgtgtgatttaaaaagttctgatgcttatgcctttatcctagattcctcatagttgagtttatccacaagggttgaagtcaaattctaaactgagtattcatagaattcctttttaacaacccatcttggttaaaggcaaaactaattcaaacatatttttgatgatttcgtaatattttgctaagttccaaaattttctaaatataaacttaagatttttcctaaaacaatttgttgccttagaaaagtctacaaccatactatcttataattcatagcaaaatcctactaatttaaagagattacagaataagtaactcttgatttaaacaatacgtctaaaagaacactcaccttagattaaaatctctgcttgagaattctcagtttcactaagagcagacacctcttcctgtagctttagctttttctggagaatggctttatctccattcttcttggctttatctccattcttcttaactattcagaggacaatttatagaaatatgccctctttgtttacatatacggcaccttggacttgaatctgaacatgcataagcaaaatgcccagtttttccacacttaaaacaattaataggaaatggtgaaggtttgtcgactggatatcgaggattggaaacatacggacgtttcctgttgtacaatggtcttccttgttttgaacggtttttctttttatttctaatgggtcttattttctcatagtgggatgccctagcccgggagtcttcatcataaattctacacatattaactaactgaggaaaccgacgaactccttgataatttacagcttgctttatttcaggtcttaatccattcaaaaacttgacacatttcgaattttccccttctacaccttgataataagggaaatatcttactaattcttcaaatttgactgcataatctgctacagtcatatttccctgttttaattccaaaaactccatttctttcttgtttctaatatcctcgggaaaatatttttctaaaaagaccgttttaaaaatatcccaggtcatatcttgattttcagcttctaatcttagctgagtgttttcccaccaaaactctgcttcttctgttagcatataagtaccaaagagtacctttttgtcagcaggacagtccattactcgaaaaattttctctatttcccttagccatgattgtgcaccatcaggatcatatcctcccttgaaagttggtggatggttccttcggaaactttctatcccctggtattcattattcatatttctttgttgattttccaaagcttgtgctaaagcttgtaatgcctctgctatagcacgattgtttctaccagccatattccctttgtttaagaataaggttgggttcaaattagtagattagaacatagcttctaatatgttcacacacatatttcttatcaaagcagttagtttaacatatccttacgtacactaactaagaaacacatatttttcttattatccaattcttcttttaattattataggagattgatacctagaattacttatttgtttttctgactgcttgccataatgttcctttgcaattcacaaattatccaggtggccagtctgctaacttatgaatatgcactgaaacttatggtataacagtcatcaagacttcaatagattctaacagcttcatccttacccattcttcttaaaacttttaccttattatcctacgtattacaagtaaaattaaatcactatactttatccaaatatactcatgtctttccaacaatttaatccaagaagcttctttaattgtaaatttagacctacagcccaatctaccttttaaaacatttcacagaaaattcaatctatgattcatagcaacatagaaaccatatcattaacaaggaaaatcaattctttacaaaacgtagcaaccacacaggacacagacaaaatcataataaccacacacagtcctagaaaacgaaccatgctcaaaaatttaacaaacccataaatcttgataaaacattccactatgttattataattctaatcaaccatttgattatacatagttctagtatataaagatttagtcctttaaatattcctccttaggctagattcaattattcattcaaaccatcatttattatgctaatttcaagttacttatcccaaataatcatttattataatttctactttataaatcatcttcttatttttaaaattttttatgaacttcatgccttaaataacaatcttaaatcttgtccaaggacttcaattaggttagtttaaaaatttcttaactacagattaaacccacaaacccaatttatatttaatttagatcaatctacaatacatacaacacatagcaaccatttagaagcacaacacacacacgtataaaacttttatcacctataaagcatcacatgcacatagcacacaacaagcatacaatcctcaggaaataaacctcagctctgataccaccattgtaacgcctcactttgctctctcgtgtttgattgattttaatttaaaaactcgtgtccactttgtgttaaaattagattagtataaatttttcacgaaatttcttttcgcattgcttgctaattttaatagttgtcagtaacataaacgatattcctcacctcgttttatgcaaataaaattcattaatacatattgatttattaacagtccaggtacagtccaactagttttgtacagacagcgtattacaacacagcgtggcaccaaatacagacaaacagaaaatcacaagcacagcataaagtacatccagcttctttgtctacagctcatgctatcctgtttctctgctcgcccaaacgaattggggtcatcacaggtgtcaaccacagacacaactcgggtaagtattttaataaacatgatcagataatcgttaggaaacgaacaacatattagtctcttaacagaattaaattaaacagcagatatgtagtatcataaaataacatttataagacagatatatgatgaatgatgcttggtttctttattaaatgatgcatgactgagatctcagcttctcataaaatcaacatcagtggccacagtcagatagccccaatcactggtccagaacttgcatgatcagtcagggtgtcacagtggtgcacaggaaagtcacccacacttcatgtgatcatcatgggtggcatgagttcctcactgccgaagcaccccccagctcagacttctcactgtctgaacgctcatactcagttcctctaactatctgacacatatctccacgaattaacccccgcaaggcatcaacaccacggattaacccccgccaggcatatgcatatgaaaaatgcatgaatggtttaattattcttctttatcatttatttcaattttatatcaactaattccacccactccagtggaatacatatcagatagtcccacccgctccagtggaacataaaataatcagtagtttattcttaaatcatttttgttacagaatctcaacaaagcccatcatcaagtgaatgttcacatatcatacagctaaatcagcgacccaattaaatacaacatcttagatacatcaccacaacatgcagccacacaatcaacaaataatatcttaacagacagccaaaataacagacaacaacatcaaaacagacaacaattaatatctttacagatagcaaaataaaatttaaacagcatcataaaaatagacagcaacccattaaaatatacagcattaattaaaatgctcagcaactaactaaaatatacagcagctaaatatacagccacatatacaacagcaacataacagcatacgtcatccagcttacgtcaacaactcaattaaatatagcaacagcaacatataatcttaattaaatacagcaaccttaaatttaaatacagacaaagattcttatggccaagaagtaagattaattattttgggcagccacttgtttattgggtaatcaaattatggactatttgctatcctagttcattgaggactttcaacaaacacatggtatgccaactttaatttttattaaacaaagaagaacatggctttaatcctaagagattggaggttgaattaacctaatcaactatctaattcatgcttattaagatactccccatacctttgttttttctcaaacttttagacagctccttgctcctgaggattggtggacagcttccccttttttttcttcttttaaagcttggttaatcatcatctaataaactaattccatgtagggtgtctaaaggttgatgttcttggtttatttttgagtataaggcatgatgaagagggttaaaaggagaagaatatatgacaccaagtgaagaattcacacggttatgcttggtttgttttgaaaatattttggacttgttttggagaagtgacaggcttgtacgtgcactcctggaccagccccccttacggtttccttctcctcacatgtataaaattttgcttcttaaaatgctatccaagccttgtaatccgtccacctcctttagcaagatttttgtgctaaaaatcttcctttactttacacttggttagcttttcattggccaattaatcacttgcttccaagtgtagttttcttgactattctaccgtgctcttgcttctttcttccacatactatttcaattttgtatagataattccattagcctttttattcctacggtagcatgcttgtttctagtaaaaatatcttttaaaccatagttatcctatctcttgatttctattggctagtcattcttttgactaagttcttgacttctccacactattcttcctttaatcttgaattacacgtacacttcaattggtaaggcatccatttggttcttcttttcctcccatccgtaggatgcctagcttggtgacaacaatctacaaatattttgtcttttactttccatttgcttttcattcattggctaatgtttcttttgaattttccaccttttccttgcctaatcttgtgttgtacgtacattttttagattataaggttattctacttattttgggtttccatacgtaagatgccttgtgtttgtgaccaattttgctttcaaaaagattctaagcattaattactacttttacttggaccaatgacatggctaggttccttatccatccatgtgattattcttgacttttctacaagttttcctccattgatcttgcatcatatggtcaaaacctaacctagaattctaaataaattcaattttccttatataacacttaattctaatttcctattggttcattacttttaattagtaaaattactaaactatcatatttagacaacctattcctcccaaaattaagagaaaatttcatagattatatttatacttttcttataattttctgatacatgaggttgtctagattgagttcttttcagaatatctttcaaaatttctagaaatcacaatttagagttttctgtcatcaaccctattgttaatttgttgtcaaaaggcattttatccaatactcagatttctacaattttctgaagtcatctgggacatttttgacctaagggtattttagtaattttgccactggccctaggggcaaaatcgtcatttctaaaattgttcaaggtttctctgtatatatcgccctagggatgttctgatcatttttcaatcatcccagagttaaaatttccttcttcttaagatatcttgctagaatccctagggacaatttggtcatttgtacaaatctttaggggtattttggtcatttactgtcttagggacctatctgtcatttgagggattgttcaaggacattttggtcaatttctcctaaggatacattggtcatttctagaattgttcagggcaaatttgtcattttcgccctagggatatagacgtcatttctgaaattgttcaagggcattcttgtcattttgtcctaaatttttctactgcatttccttaacatttcactcttagtaattgtctgttattccctaaattttggggtgttacaagcatgagtctaatcaatgtcctattcttgttggagctgaccctgtgcaggttaatggcatttggaatgatcaaagacggcaacagccacagcagaaaaactacaattatactgctggaaacaattatcaaaggaatctgcaaggaggaggattagactacaagtctaataattatctacaaccccctcctattcccaccaccagcatttctgaacttgagaaagtagtaatgcagctggcacaaacaacatctgacttcatccaagagactagagcccaccacagaaatcaagatgcctccatcaggaatcttgaaattcaaattggtcaattgacaaagcaaatttcagaaaggccacaaggacaattcccaagtgccacagagacaaatccaagggaacatgtcaatgttgtcaccactaggaagggaaaaatgctaactgaaaccacaaagcatgaggcaagcaacaaggaacttgaaaaatctgcagcagctgatacaaatgaagaaaaagctgcagaaaattctgaggagccaaattctgcacctcaacaaaagcaatgggatttctctcgctttgagaaacccccatatccggtgctaaccaaacaacaaattcaacaacagcagtttgccaggttcttaaacatgtttaaaaagttgcatgtaaatattccatttgctgaggcattggctaagatgccccattatgcaaaattcatgaaagaaattctgtctaaaaaagagaagctagtaaaaggaggaaccataaaactcaccgaggagcgtagtgtcatcattttaagaaaacttccaaagaaattgaaagaccctggaagttttaatatcccggtatcaataggaaatataaatataggaaaggcactttgtgatttaggggctagtataaacttaatgccattatccatgtgtaagtccctaggtataactgaattaaaatccactggagtttccttgcaattagcggatagatcattaaggaaaccatcaggaataattgaggatgtattagtaaaagtagacaaattcatcttccctgcagattttgtggttttggatatggagggtgaaagtgaaatccctctaattttaggaagatcatttttagcaactgctagagccttgattgatgtggaacaaggaaagttggaattaaggatggatgatgaatctgttgtttttaatgtttttaatactgtgactaatccatctaatagttataattgttctatgttagatgtgctggataacatgcattgtacaggtatgacagtattagatgcagcaactgcagtagaaaatactgcaaaagagagtttagaacacacaaaaattgctgcagaaaatttgacagcggtagctataccagcaacttcaaattgtgcagaaaacaataatgcagtaaatgcagcaaggacagcaatggcagctttagaaattgctgaaaaatgcaacaaagcttataaggaaaaaccagcagaacatgtgctgaagaaaaagcaagataatgatacaattggagcacaaaaaggtaacatacatgtgattgcaatggataaggataaaaccaagaaaaagaagactaagaagaagcataataaaaagaagaaatttgagccaggacaaaaggtaatgctagcaacatatcgcatgttatttccaggtaagaaagccttctgttggtctggtccattcatcattcaaaagaattgctcatttggattcatagaaatcatgcctatagatagagggaaaccgtttaaagttgctaaatgccggctgaaaccttacattgaaaaccaagtggatagtgctaaaactcctaattcacttaattccactaataattaaaaagcatgatgcgtctagctaagacgttaaacaagctctggtcatgtacataactgttgcttaagttttgaagttattagcctagtctttgttttattttacatatgcatgtatccatataatcattatactttcttaagtattttaaattcagttgatagcagtagatttaaatttctacaatttattcatgtaattttaagttcatgcattatgatcattcaaattttgtttaaataagtagtagtattagttctagtatgtcatttaggagtagttaagtaactttagttattaggataagaagattgaagagcaggaagaaaactaaagaaaatccagacaagggaagtcacgcgactcgcgccataaatcgcgccactcgtgccatacatactgtccacccacgcgagtcgcgtggaaaccacgtatctcgcgccatggggcagtgcctaaaagcactaatgcacgcgacctgcatggaatatgacgcgaaccgcgtgaacgtccagaattaaaaagcccgatctcacgcgagtagcgtgaaatctgcgcgacccatttgaaataaccagtttttacactggaacatgacacgacccacttcattaatggcgcgactcgcgtgactgcgcgggaattgtttttaaattaaaactcccaaatcgcgccattcacttccactcttccaaatcattgccctcaaacttcccttaactccctcaaacttccgcaacttcctctccctttcccacgcctttaaaacctatccataacttcaggattcacattgttcatacccaaatcacatattctctgcaattcactgcattcactacattcgcattagacaatggccaaggacaaggtaagcctaaactctggatcaccttagggttaaccacattttcaaaattgcatataaataattgttcacatctatcttcttgtctgtggtctgaacggattgcaaaaattttggttttagcatactccaaatacacacattgtgttgaattgttttcatgcacattacctgtttgatgaaatgcctagatgaaaaatttagcttgaaatgatgccaaagttggttcaatatgcataaggctttaatgaattaggatgacatgatgagaatgactatggtaagcaggaattgagtaataatgaaatactcttaaggcatgaattgctaatgttttgaatcaaatgccttaaacatgctaaaagcctaaatctgggaatggggagattcatcttttatatgtgcttaagtgttgaatcaaatgggggtaggcttgcatgaaataattgaattctgaaaattttgatacatgcaaggacttaaatctgggaattgttgttaagcacatccaaagcaatgtgattcttgtgtggttctaagtaatgattttatttgtaatatgtttgagtgtaaatctgggaatccacattggtaagccttgttaagtactaaattgttttctaaataattatagcttggcttgcatgttttaaattctaaattacaggtgtctaagatctgtttggggttgtttagaactgatcgttagtactgaaatttttaacccaagtgaataacaaacagttgactatgtgaaaatatggaatgaaataaatctgggaatcatgagcactgcaaaattatgagcactttaaattcccaaccacttacacacataattgttgtttttaacaactgtgcttttattcgtgtgcgtgttatttattaatgcacagttctcctggcctgattgttgttttgagctataatgaaaggaataaatcagggaattccctactgcatcaggtataattggatttttctgcactataggatgaagtaagtaagaaaaacaagctagcaaagggttgctacatactgcagaaaaatgccaacatcaggactatttaatttgtttattgttcttatttctgtttttaattttggtatgttttagtatttatctattttaaataaattctgcttcattctaggtgtgagtcccaaatactgcatgtttgattaagacaacatatgatatttttcaattattgctgaggacagcaatttcctaaatctgggaatggtacacatgcagtatttgctgaattacattcaaggatgtctaacagaaaattttttgttttagtcaatagttttaaatttttattacaataaagttggcagcacatcaaatttttcagacttaaaagtgaatgaacacagtaatggataggaattctctgataaaagcttgtgtgagatgaaatatagcatgaattgcatgatacatgattggattttgattgttggtatatgacatgcatgttgaagttgaaatgttgcttgaaatgaagtcaatagtgattgacttgagtgaaatacctgtgagacttttgagccaaatagtaattatttttcttcttgagagactccattttcttagtactctagaacttgaattgtttctctggatgcaggtataaattgacatgattaaggcaatttcttcttcttaaaactagggccaaattgacttaccttcaatcattattccatttgcacctaattttgagctttagcctttcaattctgctacctaaatcagagctatgtccattgaccaacctccttgaggctagagaaggaaatttaagttcatgacaactgagaacagggaagtgttcatcaaggcatcaaggaaaacaaagtgaattcaatttgtatgaaggaaaaagaagaaataaacagcaggccagttgagaaatattatgcctgaaattataagctgaaaagtttgaaagttgctgtatagtgaaaagaaaagaaaaatcaaaaagaaagtttattgtttgttttgttttagttattataaatgttgaataaagtaccagattttaaaaaaaaaaaagatgaacaaggaagatgaaaaaccacaggattggacttaaaggactggatctagcctcatattagctactatccaaagattttcctacctttagcccagccaagttacaagcctaaaaagaccttttgatctaattatgcttgcatctgttgagaatattttcaagcctatggtagtgctttgattatgtttgagtgagaaattgattaacctaatacatttgagtgcatgagtgcatacacacatttctgtgaggaatactcaagtcatctcattcattgatggatttgaaagtaccatagaagctttaatataatttgattatactcagcatgataattctaggattgtaaattgtggttcaggtttgattgttaatccttgtttctatcttagagttctgtctgttgctgaggacagcaactaataaatctgggaattgtttgatgtgttgcaaacacatcttgtttttagtctagttttaggttagaatttgattaaatacttaggtaaatagcttagaattagttgagtttagtattttattgtttaaatctaatttcaataccaattgtgcaatttcaggtcaaaagaggagaataaacaataaaagaagtaagttctggagtgtcacgcgtgtcgcgccattactcgcgcgagtcgcgtagaagacccgaggatatcacgtaggtagcgccgttattcaagtggatcgcgtgggaacttcaagatttaagccttttaactctgccacttcacgcgacatacttggttatcacgcgggtcgcgtgaagactcaaagcaataagcaattaccttctgtcacttcacgtgaggcacttcacacttcacgcgacacgcgtcattcctttctgccagtccacgcgactcgcgtggtatcgcgcgcgggtcgcgtgaggttgaaacagtttccttatttaaatcatatatttcaagatttggtattatattaggattagttgccttaattaagtgattctataaatatatgtagattccttaattaagaagatttgatttagatttggaacagaaaataggccttgttaccttaattagatctatctataaataaaggcctctgggggggggttctagacacatccattatctcacatctctaaccatcccaccattaccttctatcatccattctactctctccttctcatattttcaccattggaagtcaagaatcaaggcaaggtcaatcaagaatgtcttatgtgatagcttttggtttcttgaagcctatggcaggctgaacttgtattgtgggaaggccatgaactgatgtaactcctctgtaacttgaattggtattggttttaatgctgttttgattattttattctactctgtgctatttaatgttttattcttatctggaattggccattctatttaagtattgagggttagaattcgcaatggacacgttggggttctaatttctgacatgtttagaataatagttgttcttcgcctagacatagggatgcatggctacggattttataatatgttctttttcatgcttaacttaatagaattcaccaagaaattgggtttttgaattgggttaaagggttgattcactaagacattagggattaactaacttaggaaagatttattctccgaataatcttaacaagatcacatgagatatattctttgaatacttagtttgacagattcactaagggtttaggtttctcgatcgaactaacgggttaaatcgctggttatgactctagtggttctaggatttacgaatttaggaaagatttatcatgtgtgtgacttaagataataaaccaatcaagtgaaggaggtagagacaaaagggattgtgcctaaccacaattgtttcttccattggtaacttctttatctttttacttattttaatttctgattttattcaaacaccaaccacaactcaacaattacttctttgttctttatttttctgttattaattccaatcatttagaattaatactattgtgaaaattaccccaatccctgtggagacgataactctacttacctacttttattacttgttaacgatcggtgcacttgccgtattcattcgcataaatcgcacaatcgcgttagcgcgcaacagatatcatctacatagatttttacaataaaaaaatttcctttctaaacctttctaaatagtgtattgtccactatttctctagagaaaccattataaactaagaagaaactcagtctcttataccactctcttggagcttgtttcaatccatacaaggctttgacaagcttgtttaaatgttgaggtttctccttatcttcaaaattaagtggttgattcacatacaccttttcatttataaattcattcagaaaaggactcttgacttccatctggtatagcttgatatctttgtgttcaacataggccagaagtaacctgatggcctctagtccttactaatggatcaaagttttcttcatagtcaatcctttccagttgattgtacccttgagccactagtcttgccttatttttttatcatttattcttctcattaagcttgttcttgagaacacacttggttccaattattggctaattcttaggagtggaaataggattctaaacattgttctttgtgaattaacttagcttttcccccatagtagtcacccaagaatcctcacttagagcttcatcaatgttctttggctcaattgttaagagaaaggccaaaattcatttttatttgttcaaagaggctcttatcttgactccaaatgttgtttatacaatgatcagatttggaggataaaaatagacaaatctccagctttttggcatatcaacttatgttgtctgttctaagctttgtctttatgaggtatctcaaaatgtttttcttcaattttctttgagctttttgagatttacatagtgttatagccattttgtttggcctttgttgtttccaactcttcttctaaacctacaatccttttcttctcaagtgtgttatcattttcatcaaagacaacatgtatactttcttctacaacttgagttctcaaattgtagattttgtaggctttagaagataaagagtaacaagaaagattgttttgtctaatttttcatcaaacttctcaatgttgtctttgttgtttaaaatgtagcatgtaccacaaaaatgtagaagtatgatacacttggttttcctcctttccattattcatatgtagacttgttcataacctttatggtagaaacattgtttagaatgtagcatgttgtattaacttcttttgcccaaaagtatttttgtatgccaaactcattgataaatgttctacccatctcttgtaaggattcatttttcctttcaacaacaccatttttttgaggtattcttggacaataaaaaagttttaaaagaaagcattttcaaattatccctcatgatcactccttactgagacaattttgaaattttttcatttgaactttcttacataactttcctaatacttcaaaaggcacatccttgtgagaaaggaataaaacccatgtgaatctagagaagtcatcaactatcacaaatccatatctcttcccacccatgctaagtgttttggttggaccaaacaagtctctgtgcaataattctaggattctttgagaggatactacatttttgggttggaagttggatttggtttgtttaccttcaaaacaagcctcacatattttgtcctattcatatttgatatttggtagccctctcataagattgtgcttggatagtttagacaaagttttcgtgtttaggtgaccaactctcttgtgccatacccatttatcactctcaaaggctactagacaagattgattaggtagggacgttagacagttcctatagaggtttctctctcacaccagagaataggatttttcgagttgatgcttctttaatcagacaagggatgaaagatttaggaacattcaagaatggacacatggatgtttaagaggcttggaaatttgctattggtccacttgtagggtgaaaatttaattttaagtagatttttatcttgtttccttagaaaaacacgtggacagttctaagcattatttcaaaaatcccaacgatcaaaagttagatatttgagataggagtatacctttcaaattttaaggaaatccacggttaacgaacccagaataattattttacagaaacgggttttgggaaaatttaagaatgaaggaaaaacacaaaatcctcccatccacaaaaattggtgaaacttaccctctaagccaagcattgcacgtatacaatcaaggagagcctgagaagattcatgaattaggacacttgtacaatgcaaaagctttagccaatgggagaaaaccaactagaaagcaagctaagatatttgcacttccttaatacccaccattaagtaggaaccgtaaacaagcttgggcaaggaggagatgcacgtgcaaaacaagacagccaaggaaaagtgtggaattttcatgatttaggccacttggaacatgaagaatggctagccaatgaaaaactaaccacatggaaagttagtaatcatcatccttgcatatttttaagcctagcaccttataaaagaagtgtaggaccgaaagtgggcagctccaagagagaacttggtcgtgcaaaaatccatccaaaagcctttccattttatcctttcaattcaccctttcacctagagcaaaaatcaaggcctatatgcttataagttcacgtggagccctatggatactaggagcaaggctattcaaattttaaggagaaacctaaggtatgggggagtttatgatagcttagtttgaatattattccttgcttcatttgattaagtcttgtattctaagtgtttgatgaaatgtctcaaagaaataaagattgctaggaacatgattacttggataaataacttggttttaggttaaagaatgattgatgaataaatgattagagcttaacttaataaatgaaatagaggtattttagaagaaaaacaattggctaatggaatattttactaaaattaaagtagtttaggttctactaaagtttgtaggttccaattaaaaagtgttttgtaaactcttgaataggtctattttatgctagaatgatgcttatttaaccttagaattatgtagacctttataaggactaatatttaagtaattttctatgagtttaagcttgcacaccatgtgtttgataatatgtcacaatgaacaaaatatgtttaaagaatgtttggtttggatccttgtggttgaatttgaattatattcgtgtggttggttgctttaacaaaagtatgtattattccatgtgttgtaaagctgaaatacataaagcttatgaattgttgtgtgattctatacactttgataagactaacatgttgcttgtcatcttatgaatatatatgagtttaagggattttatgatgttgagatgtgttccactggagtgggtggaattatctgatatgagaatttgagaaataaagtaatggtgaagatgaattgagaaataaaacaaacaagccattacatattccatttgcatttatcccctcggagtggagggaggtctcactggagtgggtgggactgttccactggagtgggtggaactattttatggtaccctttttatcccctcgaagtggagggaggtctcactggagtgggcgggactgtttcactggagtgggtgaaactatgttgattttgataccttttaataggactctgagatctcagtcatgcatcacatgatgggtatgtatgatattctgtatatttggatttgttgtgtggtcttgttataaataaggctttattcatctgtgtttataaatattttattcaaactatgtttatcatatacttacccctatttgtgtctatggttgacacctgtgatgaccctaatccatttggggcagcagggaaacagtgaagcataagctatggatgatattgaagaagatgtgatgaggaagattgatgaattgtaattttgtgtttggtgtgtattttgtttctgtgtaacttatattaaaactagacagtctatatatttttggacgtgtatttggactgtatctatttatcataattaaaccgtagtggggagaagcgtttacgttacgaacgaaccatgaaacttgcaagcaaagcgaaaaaacattttctgtaaaatttataaataacatgattctaatacaaagtggacacaagatttcacctaaaaacaatcaagcacgagaaagtaaagagaggcgttacagataaactgcttaaggccaacttcattagagaagtcaggtattccacatggctcgccaatgttgtcatggtcaaaaaagctagtggtaaatggcgcatgtgcacagattttacagaccttaacaaatcatgtcctaaagatgcatatccattacccaacatcgacacacttgttgattggtcgttcgggttccacatcttaagcttcttggatgcatactctagttacaattaaatcagaatccataccccggacgaagagaaaatgatcttcattatagaagactccaactattgctaccgggtcatgccatttggtctcaaaaatgtcagggccacttaccaacgactaatggactgcattttcagaaagcagattacgtaatgtggaggtctatgtagacgacatggtcatcaaatctcagagtgtagcccaacatgtggcagatttagaagaggtatttgaagaagttcgaaagtatgacatgcgtctcaaccccgagaagtacatttggagtaggcgtaggcaaattcctcggctttatgattacacaccgaggcattgaagccaatccagacaaatgctaggccatattacagatgcacaacccggctaatgttaatgaagttcaaaagctgaacggaagattggctgcattatccagattccttctgaaattagccgagaaagcaaaaccctttttcaagctgctccccaaaacagcatcattcctttgggatgacacctgtgagtaggctttcaaggcattcaagaaaacaatagctgcacacctgtcttgagtcgacctcggcagaatgcaccattactcttgtacctctatgtagcgaatgaagctatcagctcggcactcatctaggaagaagggaagcaccaactccctatctatttcaccagccggaagttacatgatgccaagaagcgctatcaaatgattgaaaagatggtcttagcattaatcacctcagccagacacctcaggccttatttccaaagtcaccaagtgatagttaagactaactatcccatcaaacaggtactaaggaaactagaattggcagggcggatggtagcttgatcattcaaactgcctgaattcgacatttgatatgaaccacgtggtcccataaaggcacaattcatggcaaatttcctggcagaatttgccagaaaagatgaatccaccccagactagtggaccctttatgtcgatggagcatctaatgtgcagggaagcggagtaggcatcatacttgaaggacccagcaatatttcgctggagcaagctcttaagcttaacttcaaggcctccaacaaccaggccaagtacgaagcattcacagcaaggctcaaactcgccagggaagtcagagctcgatatttgagatgttactccgactcacagctcattcaaggctagatagcagagaagtttcaaaccaaggaaacgtaccgttctatcactgtaagtttcaaatttataaaagttcgtatccacaaagatttgagtttacgtcggttgatttaaattgttaacagtttagtagttatatacagatgataaaaagcgaagattcatttgttgtttttgtcgcgtaaaataaagataacggaaaacaaataaacgattacgggaaataaataaacggatacaagtcaagtaagtgtaggattggatttcgtcttgcttatcccttttaattgattttacctatcatgttctattcttattgccgcacacgtctaagtaaccctaattcgattcctcacaattacggtcctaaggatattttactaaatatcgattcctcgcatatttaattaaatacccaaacattaagatcctaatcacgtgtttaatgcgatcgaaacattaagccttattcctagcaacataacgtaatgagtgattaaattcagttcaaaccctaaatttactttccagtcgcctttagggttaatttcatgaaactaacggttaattagaatcaagcattaagcgtagaataaaatcaccaacaagaaatagaacaatgcataaataattaaaagagcatagggataagaagagtacatccaatccttagggaattttaagcgaacataggcagaacctcctcgagagaatcaccgactaagctcgtcatcgaccttctcttcggcagaatctccttacacaattcactctacttcactttcctaagttctacactcacttaataactaagaaagcaagaaatatggctaagctggtgcctttgagagaaaaggagtgaagaatgatgcctcatccttcaaaatgcgtccctatttatagattttggcctgctgcttggtctggttgcccaggccaccaaatccttcataaatggggtgcttgggctagctaatggtggttcttggggacttgtgctcgcccaagcgagtgaaatgcacatgaaatggtcgcccaggcgagttaaagcttagtcatgaaggaatttgttgggccttggtgcttgttgggcttggtttgctgtttgaggcttcttcctttgcttagttcactccacgctcctattttcgcaagcttggttcttccataaccttcagacctagcaaaattgaaccaattatttggacgaaatcttttcgaaacatgaaagcatgacttacctttacataatcatcatttgactaggtttctagggttatcttgtgactaaatcaattaaaataacgaatatgtgctttgacaagaatcaaaggtaaagatatcttgcttcactaaaatttggcacttatgaactctcccccacctagaatcttgcttgtcctcaagcaaaggtaaagatatcatgctttgacaagaatcaacttaatctttgatcagaacagatttttcaaaaagtagttaaccttgatactttgagaaaacaatttgatggattttcatgaaatcaaaatgaggctaaagtcaaatttacacttcatttcaaaaagacctcagaggaaacatttgactgatatcaaacagaggaaaacctctcaataagtgtttaattctcccacaggtaagtgttttagtctcacatctatcacggatatatcatagataaattttgcagttcatttcccatcaaatcataatacatagtcatcatggatcattaggtcttttatggctgggcttggctaaaaagaaatcttggtttttttggatattcaaatgaccttgagactaggagagcaaaaatagaaatagagacatttagatcattacctcctattcctttcctctttttccaagatatctattttattatttttctttttctttttcacccattcttttcatcacaacgaattttatttcctttttctttttcttttcttttatttctttttctttctttttctttttcaataatagcacataaccactgctaaaatccttttcataacataaactatccaaaagaaattttccatcacaaatcattccctttttgctctcctacccttaggtaaggtatggaattcctatcctaggttagggtttcaataaaatatcaactgtttaggctcaaaggggttttcaaaggataaatcattatatatttttgggatagctttttggccagtggcttatcacatgtttaagaagaaagatggcctaaatcatatccatgaattatatgcttatgtcaattagaaattcatgcaaaattactataaatcatatcagtgagatctctctgtgtataatgtctgtttggatgcacacactcacttgggctttaaggtctattttcatgttttcaatcaaatcatttgtttcccactgaagttatttatcaatttccatgtaaaaagacttttaccttgatttgatttttctgaaaaagaccatttatttttgtttttcatttctcaaggtttcctacaaaaactttatttttgttatgttctgattcataaaagaagttttcaaaacaattttcagttgattctttttaaaacataatatatcagttaagtcccaaaaagatttatacaagcatgtttaaacaaacaaaaagtattttaacatgtgtaatttagaaaagagaaacttctatgtgcaagcaaaaagaagcaaacatagtactaaataaacaaagtattgaattaaaactacaaagcagtaaagaaattttaaaaacgatatcactattttttgaagatcgtggctgagaagcttgatgtcctccatttagctaatcaataggatatgccacgttcttttcacttgatttgccttcttctaacaaaatggacccgtagccaagttctaacaaaacagatgatactatcaaaaagataatatataaactcaagaaaataaagacagaatttaaaaacaccgggttgcctcccaggagcgcttcttttacttcgttttagctggacgagtttgctatggctttggctccaaataattggaaaatgtggatgagccatcaactgctgtgtcttccacattcaagacatccatcttaaaacattctttttcatttgtagggtgtttgatgtcttcaaaaacattgaattgaatttcatcattttgcactctgacagtgagctttccttcatcgacatcaataagaactttggcagtcttcataaagggtttgccaagaatcaacggtacttcattgtcttcatccatgtccatgactacaaagtcgacggggaagaagaatttgtcgacttttaccaacacatcttcaatgacgccatagggatgcttaatagatctatcagctaactgcagcatcatcctggtaggcttaattacaacctctcctattctctttaccatggataatggtatgaggttgatgcttgcacctaagtcaagaagagattttcccatagataatttaccaattgtaataggaattgtaaagctacctggatctctagatttttctaggatggtcttctggatgatggcactgcatcctgcatccagctcaattgtctcctcgtcgatgtatcttcttttcttggtgatgtaacgcccccaatttactaattagggtcattactaaccacacatcacaatcaagcatataatcaatcagagtttaagcagtttggaagcataaactagaagtgacatcatcaaagtcactatcataacactgtacatcataatatggtgaatagacatcaaagtttcactgtacaatacaaaactgtacaaataacccatcagggtatatcaaagtacataaccaaaataaatgagcaacatgctcaagtcctctatcctagtgtgtccttcagtcgctaatcctgcacaggcttcttgccttgggacctctcggctgctctggaagaatcacctgcaaaacatagccccacacaaggggtgagatataaaatctcagtaaactcagggcccttgaaggtatttccttcccctggttcactgacggcagatatacaataaaataagaagccatggaataatgcaagcaattaaacttttcctttctgttgctttgatgctccaggacttgaactcgaagtcttactctacacacatctcatactgcctcggttcctctgccaaggacttacaatgttatgacagttaggtgctttgggacttgaacccagagtcttgataaaagaaagttgctttaggactttaacccaaagtctttataaaaagggtgctttaggactttaacccaaagtctttataaaaagggtgctttgggacttgaacccaaagtctctgtcctcagattcaattcaggcattcaattcatctggcaccactatacacggccatttcctttgttagagctcaatccccaaacattatacatcaatttcccttttatagggtacagatcacagttaaccacataatgcacaatcattacccattttgtgggtttaataacataacaatcatcgattaccctttttcagggttcagtaaacattccaacaacaattcatagcattcataaccttatacatacattcacatacatattagacatcaaataccctttcacagggtttagatcacatatcatcagtcaatcatagcattatacatcattcctcttctaacatacatacataacagaaccataaccccactgggtttatggtggaacacagcaaaggaatcacaaacaagcaccaagagcttacctgctctagacagatcaccggctctcccggtcccgtggtcaaccccacctgagctatcaggctcacgtcctacataaaacaaacatatatcacatcaattacggttctaaaccgttccaacgaaaggaaccaccatcctttctctaaacatatactaatcactatacaagtgatctcagacccttcacaagagtcctactcagcctatacagggctacagagcttccatacatgctctgatcgactatggccaagcatatctctgcttacaatggcctaaaaccaacctctcgtaatgatcagtttcaaccgatcaaactcatccatatggtctcatgagcaactttgtcaactgctctaaggtccagactagtcaaatagtcaaccttttccatctgcatgtacagactcagagccaaaatcaaacttcatcactaatgatgattcaaggctctaacttcctcagaatacctttctgagcataggactctacagagtccgagcctaataacggctctaacacctccaaaaacacccctcaagataaccccaaaatcccaaaattcaatacacagaaccaacggttagagctcgagtttcttacctctgtggcgttcaaaaacaccagggaatagctttccctaagataactcgcccaatcacggcctctttcgtctttagactccgagctctcaagggttctctcagagaaatcaatctcactatttctcacccttttctcagaaatcaatcggggtatctcacttatctcgaggtgctgatcattttctcaattgagtctaaggtgtttagatgagagatgggtaagatatggagctctcaaagtgcatcaatggaggttctttctttctctctctcttttctcttttttccctttctatttcagccctagaggcatttataaaagcaaactgtcgatctcacgctacccacttgaacatccacgctactcacttggagctccagcggaaaacatgattttccagggcacttcccacgctactcacttgggactccacgctactcacttgggactccagaggaaaatatgattttccagaacacttcccacgctactcacttgggattccacgctactcacttgggatggcagacagcattggtatatttatacatatggcgtgggtcacgccgaacttcacgtgggtcgcgccgcaggccagaaaaccctaaaacttgcatttttaaagcttcttcctcaagaactctaatccataaacttaaatactaatcccaaagcttaatccaagcttaacctaggcttaaacacatggttaaaattccagatattacaccgggggagtggtggtcatttcatgatgcatgcattggtagttgcatcctcataatgatgtatgtatgcatatgtgcttgattttgtactgtgatatgattgtgatagatctgttggccaatagatagatatggacctccctaggagatggttttcctcctagcatggctggctcttggttgaggtagctcccaggggattgattcccacaggtcaggggattagaagttgaggtagctccttctattctcagaggtaccatatgttgtgcatccatgcgaagggttagcacccaatgggatggcacaggtgcgagttccggactcccactgatacagacgttgaggtagctccgtcaggcgttgaggcagctccgctatgtttgtatgctatgcttatgttgttatgagggccagagggccaggccagtgggccatttgcttgtgattgcctgatgtatgtgttatggaagtgggccagggtggaggagaagcctccatggaccctgagcttactgagatttgttatctcaccccgtgtgggggattatgcttttcaggtgactcttctggacgaagagagcagtctcagggcaggaggcccgagtagagacatttctgcttggttgatggcagcagatggagcgtgtaggcttagttttggattattttgtttatatatggtacccttgagaagggatggagtgtgtgtactcctgatgatttgtatagttctgtatacccctgtgagggctgatattcttttgtatcacccgatgaggtgtgagtactgatgtatatatttgtacagaactatttcttatatgtttatgagacatattctcccgtgtatagctgtggtatacgtgatatatctgcctatttctgatagatatctgtctgtatggtttatgcgttatgagaaactggatcagcaggggtgtgcttttatgctttgtgtgtgactttgatgagttgatgttatttcatacataatgtatcaagaaaagtgattctgtgcttccgctgagttttgtaaactatgttttaaacgttaaactgatattatggatgataacacttcggaggcctacggggtgttacacttcaccttgactttgtttataatcatcaaagtctttttgaagcatcttatacttgtcaacattgctagaggaagaagcacacacacagccatttaatttgtaacttgaaacaagtttttcattttcttctttcaagctgcaaatttcattttgcaaatcagttatttttttaatatgccatctaagatttcctttgagcttattattggtttttgcaagtttttgggcttcctcatacatttcttgaaaagcatgaatatcttggtcaagttcagaatttacctcacttccttcactaagcaaatcatcatcatcttcattgatggttgaggtaagacacatattagcttcttcattttcagtggaagaatctgaagttgttgactcattgtcctcccaagctatgtaagctcttttcccttttctttccttcctgactttgctctcagcttgttgcttcctcaagtagattgcacattcagacttgatgtgacctggtttgccacactcaaaacatgtaaagttgttgtcaatcttcttgttgaagttgttgttgttgctgctgtttttgcttcctttgctgaaccttttgttcttgtttttcctcagaaatttgctgaactttctcacaactaagttcacattctcttcatcatcctcttcacttgtttcctcctccttttcatttcttgcagtttcagctttcaaggcaatgcttcttgttttcttctctgcatcttcacaagatgttagttgagacatttctaattcatattcaagaagcttaccaaataatgcagccattgacatttttgacaagtctttggactccttgattgttgtaacttttggttgccaaggtctggtcaagcatttcaatattttgatgttaagctcctcagtatcaaacacttttccaagacccaaaagatgatttactatatgagtaaatctgctctgcagctgtgaaatgctctcattggagttcatcttgaacatctcgtactcatgaatcaaggcatgcttccttgaccttcgaacctcttctgtcccttcatgagtgatttcaagcatctcccatatctctttagcacttgtgcatctcacagtcctgaaaaattcatcagagaaaagtgcagaggtgatcatatttttagctttaaagtcatactgtacatttctctgttcagcttcagtcatttcgtcccattctttgggaatcaactcatttgccacagttttctttggaataaaaggtcctttcacaattgcattccatgctctagggtcatttgattgaataaagattttcattctatttttccaaaaactgaaatgttccccttcaaacatgggaggtctgtttaaagaggcaccttccttaaaggttatttgtgaagtattcatggttccttttgaaaagaaaaagtgatcttgagtaactttcaagaaccagctctgataccaattgaaaaacaaaggaacacttcaaacaaccaagagggggggtgaattggttgaaaacttgtccaattaaaattttacatcagagttataaaccacaagatctttatcacatttaaaccaattttcaaagacaaaacaaatctcaatatcaaaatcagttttcaatcaatcttccctttttatgagcatcagaaaacagagtattacaaatctgagcaatgatattgattcacaaacaaagtaatacgaaattgaactggaagaatagagagaacacaaagatttttatactggttcacctcaaacactatgaggctacatccagttctccaactcaacactagagaggagttccactattgcaataaaatctttacaagcaatattacaagtctctttccttcaaccctagaaatctaaaaccctattagattctaagacaaacccttcaccctgagaaccctacccaggtgaatcctagagaaaccctatctctttgcttgcaagaaactaattacaacagaaatacttttaccaatttacaaagaaattgtttacacaatcaaaagccaagaaaagatatcacctgataatccattgttgaatgaatatgaatgattaacatatgagtatgcagattatcaccacagatatgcagcttttcttgtaacttgattgcaagaagaaaacttcagctcatgatcaatatacccacatgaatctaatgaagttcctacgtgtttctctatcacagatgaatatccagaatgtttgtgaatgtttacaacaataatcttttaatcgcacacgaattctcagctcttctattttatttcagtcgcagaattctatttataactgtcaattaacttaagataatcgattaagtacgctctagtaatcgattatttatcatttgtaatcgattaaatcaagatagtaatcgattaaaaagcttatgaaacgttcagagttccaagaacgagttatttaatcgattattccgatacgtaatcgattaagcccgaggcacatgttttttcaagttatacaaagtaatcgattaatgacaaactgtaatcgattaaaatgtttatgagcttttctagatttagtcaaagaacaatataatcgattattccgtgaagtaatcgattaagacagtcatcatgcattttcttgagatgtatgttcaagcaagtaatcgattaaactcttatgtaatcgattaagaccgaaagcaccatttttcataaaaatcctgagtaatcgattaaaacgatatgtaaacgattacaatgatcatactttgttttctaaagagcacgaagaacaaaataatcgatgttctacttcttgtaatcgattatttatttgttacttaatttttccaaaaacttatttttctaagtgccttttaaatcaatttcttttacttaattatttaatccaatgatcttaaatgaatgaatgatgcatgactcacacacacacacatggattatcagatcatatacttccttttacatatgattaaattgattctttaagcttccctttgagcatctccatttgtgcatgtttgaatgtccaaaacctttgaagcttgatcttcattcttgatacttgacttcacttgaatcaacactgctttggcagccatgcagcaagagatggctgcaaataggcagatgcaggaggcgatgcaacatgagatggctgctaaccgcgaggtgaacgaagccttaatgaaggcaaatcgggagatgatggatgacatgcggaccctgagagggggtaatcaggcatcctcagtacctcctactcatgaaggtgatggtagccgtcaccaggctagtggtagccatgccagaggggaccagatgtcccatgttgaggctgctgaggaggttgcagccagagggaagatgctagtggctttcagaaagcatgaccctccagttttccttggtggctatgaccctgttgctgtggctaggtggcttcaggctttggacaagatctttatggtgatggagtgtcctgatcacctgaggttgctttatgcgacctatatgcttcagggcgatgcccatgagtggtggaccaccacacagcagctgttgagaggccgtggagaggttgtcacctggcctatgtttgagccttgcttcctggatcattattttcccagggatgcttgtgagcaaaagcaagcaaagttcgagggtcttgttcaggggaacttgaccgtggatgaatacctggccaattttaatgagctggccaaatacgctcatttccggaggatgatacctaaggcggatatccttgctgctaagttccagaggggattcaaagagagtatagctgtgttagttgccggtggcgggtcccgtgatatggacagcttggtgaggcagtgccgccaagttgaggacacgctacgcagatttggaggcagtcagtcttctccctcagacagacaggaagggaagaagaccagcagtactggcccatctgggaagggtaagggcaaggatgtgagagtctccacctcttttgggaggttcaagagggactctagccggagcggttcatctcggggaaggcgagccccgaagtgcccagcatgtggaagggagcactgggggacgtgctcctcaggccagatcatatgcttcagatgtggccagccaggccatatttcccgtgagtgcacacaggcagaaggccgtgcacaggctgctacagttgacatgaccacacccacggtgggtcgggtgtacacaattgacgccagagaagcagctagagctccagacttgatcagaggtacggttctgatcaacgcttgtgatgtgagagtcttgttcgactctggagctacacattccttcattcaggatgtgcttgctaataggctcaagttgcctatgacttgtttttcctcttcgatggaggttagcaccgcatctagtgagagatgtcgggtaagcacgtgttgcaaggacgtgtggtttcagtttgatggcagagagtacatgattgatctgtactacctagctatgcctacccttgagattattctgggtatggattggttgaccaagtatggcgtgatgttggactattgtcagaagagggttgtagtgccttctgatggagctggctcaagttccgcctctttcctatcagtcttgcaagctcgtaaggcactcagggaaggagctcagggctatatcttcacatgtgtggttgaagataagccaagtgtcgatctgtcgcagatcccggtggttagtgagtttgcggatgtgtttcccgaagagatcactcagctaccaccagagagagagatcgagttctccattgatctggttcctggtgtgggacctatatctgtggcaccttaccgcatggctcctctggagttgagggagctgaaggtgcagttggaggacctgctgtccaagcagttcatcagaccgagtgtctcaccgtggggagcaccggtgatctttgtgaagaagaaggacggcagtatgaggctctgtgttgattacagacagttgaataaggttactatcaagaataagtatcctttgcctcgtattgatgatttgctagatcagttcaggggagctacggtgttttctaagattgacctgagatccagatatcaccagatttggatcaacacagagtgcttgaccgatgtattagtactaaccttgttcttaactttgagaaatgtcatttcatggtgcatgagggtatagtcctaggacatttggtctctagtagaggtactgaggtcgataaggcaaaaattgatgtgattacctctttgccttaccccgattctgtgcgagaagtacgttcctttcttgggcatgtaggtttttataggagattcattcaggatttcagtaagattgcattgccattgtccaagcttctccaaaaggacatagactttacatttgaccagccttgcaaagaggcatttgagggattgaggaagaagcttactacctctcccatcaggtggatgcttcttcttcaggaatttgacattgagattaaggacaaaagtggtgcagaaaacatggttgttgatcacttgagcaggattaagggacctcttatgtcctttcccattcgtgataattttcctgatgagaacttgatgcatttgcattcatcacatgtcacaccttggtgtgctgacattgttaatttccttgttgcatctgttgttccacctcatgcatctaggtcccaaatagataaacttaagagtgatgctaaatattatgtttgggatgatccttctttgtggaggtttggtagtgaccaagtgatccgaatgtgtgtgcctgatcattaaattcagtctattcttcagttttgtcataacacacctaccggaggtcatttttgtcctcagaggactgctaggaaagtattagactgtgggttcttttggcctaccttgtttagagatgctcatcactttaccaccacttgtgagcagtgttagagagcaagaggcacaattacacatagacatgagatgcctcagcaacccattattttttgtgagattttttatgtctggggtgttgattttatgggtccatttcctatttctcatggcttttcatatattttgcttgctgttgattatgtttctagatgggttgaggctaaggccaccagaactaatgattctaaagttgttgtggattttgtgagatacaacattttttacaggtttggtgtgcctagagccaccattatcagtgacaaggggagccatttctataactggttattcacatccttgcttcagaagtatggggttgtgcatagagttgctacagcttatcattgttgattcaagaggaaccatgcatgaatgaacaaggatcaagctttgatggttttgtgctttcaacatgcatcattggaaaaatgtcaaaaagccatgaagatcaatttgattcatgtaaaagggaagttgtgtaatctgataatccaaaagcatatcatgcataatcattcatctatgattgttagattaaaggtctaagtaaaagcaattaacaagaaaggcatttaaaaagctaagtttttggagaaatgatgttttactgcattaatcgattacagcattgatagcatcgattattttgttcttcgtgccttttggaaaacaaatcaagaacattgtaatcgattacatatcgatttaatcgattacataggcttaaataagaaaatcgtgttaactgccttaatcgattacagaaattcgtaatcgattacatctatgcctatgagaaacatgttctgctggtttaatcgattacatgtcgttttaatcgattacatagtacatttgagaataaagtactgactggcttaatcgattaccaaattttgtaatcgattacatagtgtatctagaaaaacatgactgtctgaattaatcgattactccacggaataatcgattacattgttcatagctcaaacactgaacatatcaggagcattttaattgattacattcttgaattaatcgattacatatgcgaaataatcgattacaggagcgtgtttaatcgattattttcagttagaaagctattataaatagaacccatagccatgttctttgtaagattgaatttttcgaatactgggcaatcacaaacgttcataagctttctttagtgagttttctgagtttctaaaacacatttaggcttcacaaattcgtatgggttattgatttgaagagtgaagcatcattggttttcaaagcttaaggaaaggaatgcattgagtctgtaatctttctttcaacctgattgaatcattcacatgcatatgttctttggattatcaggtgaaatctttccttattctttgaaggtgtaattcttttaattgaattctgtaaagattagtctattgtaaatgggttttcttacatgattagagatagtgtttctctaagggaagctgagtagtgttctcagttttgggtttggtctctaaggatctaatagtgttttagacttctgaactttatctagggttgataaagagaggcttgtaatatcttgtaagaatatttttgcaatagtggaactttactctagtgttgagtggaagaactagatgtagcttcatagtgtttaaagtgaaccagtataaaaatctgtggctaagctttcttcttatctcttcatctctcaattgttttggtggtgattcaaattgtttgcacaaaaagttttctattgctcattgatttcttgacaaaggaatttgattgaataaatgattcttggtttcaaaacattttaaagtgataaagatcctatggaaaaactctgatttgaaaattttaatttaccaaggttcaaccattcactccccccctcttggttgttttgaagtgttccattcattttcaatcattcccaaactaatggacaagcagaggtttttaacagagagattaagcaagttttacagaaggtggtgcaaccaaacaggaaagattggagcaagcttcttgaggatgctttatgggctcataggaccgcttaccgcacacctttggggatgtctccctatagggtggttttcgataaggcatgccaccttccagtggagattgagcaccgtgcttattgggcggtgaagagttgtaacaagtcatttgatgaagcgggtatacaaaggaagcttcagttgcaagagcttgaggagattcgtttagaagcctatgagaactccaagatttacaagaagaaagtgaagaaattccatgactctaggattcttagaaaggagttccatagtggccaaaaagtgttattgtttaattctcgtcttaagcttatttctggtaaacttcgatctagatgggatggaccttttgttattactaatgtttttccccatggtgcagttgagattaaaaatgaagctaccggcaaagtattcaaggtcaatgatcaccaactcaaagcatttcatgagagcccttaagtggaggaggagcttgtggaggacatctctttggtcctgccaattttgcgtgaatgacattttggggtgtttccttttcccttcttttatttgttgtctctttgttgcatttctttgcatgcttacattgaggacaatgtgcatttcaagtggggggtgaaggatcctaaaattttttgaaactctggttattttttgttttttgtttttgtctatttatgttttgttgttgtctgtttgtctgtgtctgttggtttctattttatgtttgtctgtctgtctgtagtctgttttagttgttgagtctgtatgtctttgttgtctgtttctgttgtttttgttttgtgctgtttttattgaatttaggcactttttcatgtttttcataggatttccaacttgtataaattgtgggaaatgttaaaagttggttggattgtgaggtttcatacttgatgtgaatcattgttgcaattgttgaagtgataagtaggcttgagaaatagaatttaagatgaaccatgtgtggtagaattatgccttgtgagtttttgagcctttgtggatatgttctttcatgtgtgatttcacccttgtgctagattactctatgttttgccttgcctcttttgacattccttgttgcacatgctttgattgagatgatttaggccttctttcttttagccactagccaaataaatctatccttgtgttgatatccattgtcaccctctttgagcctctagccttttctttcttgtttgctcattaaaaaactaaaaaaaaatgttggaaaaccatgttatcctagctttagggagaaaaggggctttggaattgttttgggagtgggtttcaaacaagtgtagggtgtttgtcttttgttttgtttggaaagagaagaaaagaaaaagagaaaagaaagagttcaaatagcaaaagttcaaagaaaaaaattgtgtataagcaaagaaaaagaagttcaagcaaagaaaaaaaaattaaaaaaaatatatgcaataaaagttgttatagttcatcttcatccttgtaaattcttttaaattttatcttattgcttctacccttcttttatcttgttggcttgctcctcattgcccctcttttctcttaagttttagcctaaatatccttttcttatctaccttttcctaagccattcattacaagctaataaagtcattttgatcttttgatgcatgtgtatttcaagttgaatgaatgagaggtttgtcaatgcttggatgtgctagttacatgtggtgtttgagtgtaaatacaagccatacacatcatatgaggttgagtgtcaccctttgagagaattctatcaccttggtgcgttcttaattttaaacttttacaccttttgatcatgttttcatggattgtttgttacatcaatattattcttccacctttccatctctcacttttgaacattgttgtgatccattgaaaaatatgtgtgccttgttcatacctttctttaaattttaggtttactttagtttgaatttttctcttagtctttcttttagttttgtccaagagtgcaaatgttcaagtgtggggtattttgatggagtgcttttagttaaatatttttctatccttcttagcttatttgacctcttttagacttttattttcccattctaattcagttttgtcttaggcaagtaagtgggcttaattactaattgtagcgtatttttggatttttgctcacttaacgtatctgacttgtgcagggcctatagagtgctaccgatcttcgaatggagcgttctaggactccttggaaagataatgaaaagctctacaagtttactagaaatagcccaaggccaattctgtcatttggatggttattttaagcttcgaagttagcacctctgcacttgtaattttgggcagcgaattggacttttagtggtgtaaatagtaaataattagattgttgggtttgtttatggcccattctattttcagaacttagtcactatatacattagtgactttagtgaaacttacacagcacttttacaattcaataaacaagttttatatttcttttctttagtttctagaatcaaaagcttgttcttcattttctctcatttgttcttcattgttcttcatcttcttcatttccattttgctatttttccatttttctgcacttacttcatggggctttccttggtgatcatcatggaaggctaaatcattaatcaatccaaggatctaactcaagcaagagaagaattggagttctggttcggtatttcgaattctacttgaatattgaccttcttcttcaatttctattatgttttcatgattatgaatgcatttaggattgaaagtgagttacgattatggattcatgtcctaatttcaaatgataatcacaagattaattgaatgatagttcaattagggttgtggtttcaattaatttaggagtagaatagattgaattgcttctattgagattgaatgaatgttcatgatagaatcaatttatgggaatgatgatgatttgaatagcttgggttggtgaattggattgatgctttttaatctgttttactttactccttgataatcttgttaatttctgcattgttctttaattttagtttatgttcttgcatgttttactttgcgcataccagttgttcgacaaaatccccccttattattgccaatgatttgaagctagaaccatattgatcgtgtctctgagtcgacctatgttaactctgtgctacagaattagattagttaatttgttttagagcgtctcgacaacataatatcaatacctcttattttatttacgtcaatatttcaggattttgactatgattcaggaagtatcgcctgattattctcccaggcccagtctcgaaaacctaagaacatgtcttggtacttgtcaaggtccatccacgacaagttttgctaaaatccagggcggacgcgtcctggtactttccaaaggttcgcaacaccctagggctccctaggaggacctcttataaaacccagggtctgccttggtccggggtccatcctcggaagaaggcccaaggtccgcccttggaagaaggtccgtaaatccggtctcccggttaaccttgtaaaatccaaggtccatccttggaaggtttgtaaacccagcttcctagttaaccttattaagcccgggatccgtctcagcagtccaagaatccgttcttggcctttcataggttcataaatccaagctctggtagaccaccacggttcataaacccaaagccttggttgaccttgaccttgctaagcccaagacctgtcttggcatgaagacccgggggtccgccctcggaagaaggttcgtaattccatccgactggttgaccttactaagcccgagatccatctcggtaattcaagaatccattcttggtcatttacaggctcgtaaaaccaaactatggtaaaccttcaaggttcgtaaatcctaaagctttggtcgatctcttaaaaatccagggtggacgcaccactagtatgctcttagcagctcccagacccaagatcacgtcttggaaatccagcatggacaataccaccggtatcagctctaacaaacataaggtacaactatacaaatgttatcatatttcttccttgtagaaatataaaagcccaagaagcatacttggcacataaaggctgaggtccgccctcgtacgcctatagacaagaaaacccttggttttatcacagattatggaaccctgacatggtcaacctcgtacttaccccattatctattacaaaagtatgagttatttatagctttactctgatgatttcagcactcacaaattctatttgtacagaattacgagccatacaaaaaccaaggaaactcttggcatatcaaaacccaaaaacatttttggtactaacatatttggagctccggcaccatagacttatctatttttgcaggaatagttgtccaagaatatcgataaatcaaaaacaagaacccggtattatttcatttattcgacaacttggcattatctcaatttcgacaagaatgaagagaacacaaatgatttcattaaagtgattgaaactttacatgattatccctggtaaaagtacaaaagaagataaatataaagcgacctatatgtcagctgcatcactagcagattcttcatcagaaccgagctcttcttcatctaccaaggcaccgttcttcacaatgaatcaacctccttgggagcacttaaaaactccaaaggggtgacagtgtgagcagcaggtggtggcattgtagttggaggaggcggagaaggagaaggagtagtgggacgagaggtaggcggagccgagataacaactacgggaggtacgaaagtgggttgaaccgaggtcacgaccacaagaacagtgggaactgtagcacgaacaatagatgaaggagcccagacagggggaggagaagtcaacatcaacccagcagcctcccgcaatgcgcgaagaccacggggagtgcaagcagccctagattttttgcgaccggatgtctcggcaccttcatccctttttctcttagccaactcgacaagggaagaactggagagtgcaacggctacttgagaaggctcaactcggatagtcggtcgaccctccctttcagctgggggaggaactggagatgccatgacgttttcatctgcattacgtaccaacaacctccattgaaaattgcttataatgcctacacaaacacaaaatataaaaatgttttcatgtgtgaaaaataaaagtaataaaagaaaagttaccatctaatgcggcgaaaggatcactggccgagggcaaagctaaaatagctcaggcatccaatgaagtcggcaacagttccagagttgccttgtcagacctttccacaagggttaacatgtcatcatcaaaggatttggatctggtggggtcagcctaccagtaggagggaaactgagcttccccattcctattgaatatcaaaggcaaacccctagccgcaacaccactttcacggaccttgaagaattggtctttaaatcggcagaacacattagtgtccacctcaaacagttttttcgaaatgctatgcaaggagacccaagaaacttttccatatggcttagtctgaaagaaagagcaaaagagaggaaaagtagcaggaatgcctagatgagaacacaaaatctcaaaagcccgcaccacggcccaactgttaggataaagttgggaaggggccacattcagatacgacagcagagcgctttgaaagggggacaaaggaagagtaatgtccaacacctcaaaaaggtatcggtacatatagaaaaaaggtagagcacccgtcgccgccttcaaacaaggaaaatcatcttccccgcaaggatcaacaatgatcttgctggcgttcaaaggagccgtcatctgcaacgtcgaacgaagcgtatccacggaggcaaaagaatttatggaggagcgatatttgaaaacatcctcccttacccactcatatccgtcaataattgctgcgagaatgggtggatctatattacggccatcgtgagaggatgtccttactctcatcaccctgtcagaagaagagacagggggaaggaaggtgagtggtaaaggttcagaaacccccgcttgtcggatgggacgtgaggatcctttgccagtctggtgagaacgattcctccttctaaagcaaaaagatccgtcggagacatcttcatgaacatcctcctcagaagaatcaccgatagaaattacattgcgcataatgcgctgctcaatagaacctccagaatctctacccccatacctagagcagaattagaaatgggagactcagacatttttgaaggaaaaggttaaagctttaaaagaaaaagaaaaagattcaagaagatgatgacacaggtgaaaatggaagtaataatgtgttagctatttaaagagaaggaggctcgacggttatttgggcagaaattcaaaaacattccctagaagttcgcgccatgactaacctcaattctcgttactgaacgatttcatccactaatgcacaatctctaaaaacgtggccactccccaagtgacacgtgtgcatgggaaagtagcatgaagggtatgactctgtcaacatttatgagggcacaaaatttgctccaagagatcatatcacgtagtcatggttgcaaaaaaaatcaccatcgacacatcatcttgttgtcaaggttagacttatctaagacaagtcaagaagggctatatcgggacaactcatcgtcagcccggactacgttgtctaggttcattcgttcataagaattaaatctcttttgggcataaatctgaggtccgtccttggagctatacataaaaccgaggtccactctcggcattcagcaaaaaccgtggttcgtcttcggtattctaaaaatccaaggtctatcctttgtccgaggtttgttctcgacaatttgcaggttcataaatcaaaactacgccgaactcatggttcttgagtctaaagttttggccgaccttaatgaagctaccgatttcaacatatgacatcatctgtttgcacttgggggctgacaaaattcattttactactatgacatcggacgatatgcatcaaatgctcattccccttcttttgcccataaattggctcagaggctgggggacttatgtacagtccaaaatagtaaaataatacgtggcccctctcaaaggtcactgcacatcttccacgtcagcatcgtcacaagagtatatctatgatatcaacatattcaaatgagggtaaccaccttatcaaataatatctcaacaagttatctactaattgctacttatctacaagtaacaatatatcaataaggtacacattatctcttatttaaaatatagataattgcttgttattatctgttattattatcttatcaacaaattatctataagcaacggcgcaaatcccatactccacgctataaatacaaccatccaggttctctctactcactccattctcatcctgtattctcacaaaataccttactttcatctatacttgaatgcattactcaagtctcttattctctacatatttgactgagttctcacttggtcattctttaacaattgatgtacttacttgagcgtcggagtgtttttcctttgttttgcaagtccttcctctaagcaaagtccattcacctctcgaagatacaaggtttggagtccactgaggccacatctagcccacacgtggaatttccaaattttggtaagaacagttactaatatccattgtagtttgtgcgcattagcatttaacaaaaaaaattatactagtattaatatatataacttataatccactcatatttagaaccatttatctcttttaatctactctcttttattttcttttctaaatttaattttaataaatcattttaagaaaattgttaatagttaaaactatcattatatcatattttatttgttcatttttaattcaaaatataatttatgaatttataaatacttatatattataatatttaattattataaaatttaaaaatatttatttattataataaaattaatgttaattatataaaaacaaatattcgttctgaagaagcttcacaaccatattctattgcaaattgcaattaacaactaacaattatgttttagtagatagaaatatttgattatttgatatgtgtttatatacatgaaacaaagattaaaaaaaaaaacaagagctcgtaatatctctttcactaaataattatgaatgcttaaagaagtgctatatcccacataggaagatgaatccttaacattttccagccttcgtttcccatcttgcatctaacactgtgatggaaagtttactaactgagcacaagttgtgatttgcttcaaatgcaacatcgttttcagtgtaaaagccaagaacctttggttttggcaatattttatcaatattcaacactaaaaccactaatgacatgtctaagaagattttgtagtttttgggattggtaaatttcctgtttttcattccagttacaacaaaataactccatagctaaagacatccgacgtcaatgagaagtgaccacatataatatattcaggagacatgtaaccacttgcaataaaattttcatagtaaaataatcaaaagttcacacagcaatatcaaaaaatcataattatatagaaagtaactatgttcgatccagccacctaatttgtgtttgtctcaacttgatctctcaaaaatggtcgagccagaccaaagtctgatattttggatccaaattagcgcctagtaaaatattgctagcttttagatctctgtgaatgatcctgggcctagagttttgatgaagataaaaaagtcctcgagtgatgccactgataatgttgaaatgctcggtataaccgtttttgcaattagacttgatccttgtaacacaaccgttagaccaaattgataaattccagtgttgagttgagggaacttgggaacacacccttttacacattcacatgtgggataactaccatcataactagtgcatatagaatttacaccacaaaagacagtttttgcattgatattggctgaatgggagggagagagaaaactaaaacaccattcacattcctttatgaaatttatcttcctactatccaaaattttttaaaataaaattatagtttcatcacgggaagaaagaattgtgataattcaagaattggacaaagacaaatatgtgttaaaacttactgcgagtaatatgtttcaaatggtctcaaattcataattttatttaaaatgctttctatattaaaaaattatttacaattaaaaaaactaaaattttcaatttttcaaattctaaaataaaattgaaaatttttattaaataaaatattatattaaaaataagttatataaaaaatccaaaaaacattaatcaaaacaatataaaaatttagaaattatattaaataaaataatattttaaaaattagatataccaaaaatccagaatatattaaataaaattatataaaatttaaaaaatatactaaataaaacaatattgaaaaaaagtaaaaaagatcatatctatgatgaagatcggtctaaaaatactttaaaattagataaaaatatattaaatgatattttacgtcaaaaattaaaacacgccaattttggtctttatttcaatcgttaacagtttttgcgacagaatactgtggtcgcaaacataaaaaaaacaaaaaaaactacaatattgcgtcgcaaaaactgttagcgactgaattagacacagatttagtcatgcccaatttaggcgtgactcaagggggtgtcacgctcaattttggcatgtctctctgcctcatatttgtaatatgtttcaaaacagtcctaaattagtaattttttattaaaaaaatattattttgatttttctgcctaataaagacatgataaatagttttttacctttgaattttttttatatattttgttttacatagaataaattttttaaacttcttttttattatttctaaattggtatgaatagatccaatagtccgacataggactggattaggcctaaaaaatttcctgtctgaaaaaatataaactaagtcttaatcgattcattttcaatatgtgacttaataggccggatcaaaccaaccttatcagtccattttatcaactttaattgtgactactagctagcatactagcatcacgtgactccagtggtgcaaatctcttattgcttatagaaaaaaaaatgtgctttagtggcgtaaatctcatcacgtaacagttttttttttttttaaaaaaaaaaatattaattcaagccataaaacaacagcctcaatgttatacaggccagacgaggctgccccagttaattgattggcttgcacgggctaagctggcctgatccatttgataactatatattactttgtagttttaaaactaaattattatatactaactaataaatggttgctttgaatagaacttgatttggtctttttaagtaaattagtatcaagtttgagtcttgagataaaaaaatatagttaggaggaaaaaaaagtcccattagacagcgaatcaagtttcttgatggagaatagtagtttcttatttaaataactattattttcataattttcaaataagatgctaaaaagttttatattaagagttctgttgtgtaattaataaaatattttaaactaaaataggaaggaatcttgttcgaataacatctctatgggtaatagaactcgatcttcttttgagtatttagtgtagctatcataatgattttaaattgttaaagtaaaatttacatccttgttgtttatcacacataatacttaaaaccactcaaacgaaaaccttttaatgaatttgactcttttaacatgagaagtgaggaagtatattttataataataaaatacaaatttaatgtatatgtaacggtgtaaaatcaagtcatatatcatcgtttaaattaatttaatataattattttaaaaattaataaatttatcatatataataaattgtgattaatgattgtgtaaaattttttacgttatcaatatataatattttttctcataaaatatatccacaattattaagtaaaaaaatcaatagtagttgagaattacgataaaattgagtaatatataacaaaatataaaataattataatcataaccgttaattttgtaattaatagatattcttccactttatcttctaaagtacattctcctcactaaaagagcaatcgaatttttttaaatatttataatcagttaaaggtctttcctagcctactcatgaattatgtgtctgtgaaaccaattcctattttaccaccttaggaaacctttctacctattaatttctaactttcaagttgcattcacggtggctgtttgatcacgtagatatggattttttttccaaggtatgaaattttaaaaaaaagttaaaatgctatatcaaattaatatttatttcgactcaagtaaaattatttcataaaagatatatgtaattctttgtagaaattaaaaatttaatagttatttttttagtattagtttaggaaaaatcagtagtcactttgcatgcacacatatagatagagagactgttttatctgcacgactttttcataaactgtttaggaaaaaaaaaaaaacgcaacgctgtgtatttttcgatagaaatgtttaatgcataaaaacaaattaccaaaaaaatgaaatagccaaaattttgtgaaaatatttgactgtattcttttattctgacattctttttaacctttaggtaaatctatatattttcctattttaacttcttagtatagacctctcagaaaacttcttagtatagacaaattttagtaagaattctgatcgtgtaacaataccgatctgaaacaaaagtctgaaatcacagaagaaacagggcatagtaattacatatggtaagatgaactgatttattaagtgatgatatttagaatgaccacgtctctcaaaacctcactctttctttttattacaaccaatattattatttattttttacttttagccattacatttatggtttgtactattagacgcatcaaaataaatattgtacgtagcaaaatttatgcagagttaattaatgtgaaacaaacatcaccaattcaccacatatataatttctcaatgcaactttctaattgttgtataaagctgtttttctctcctcacgaaaagcagcttgaccttttctttgctttcacgaaaggtttgtccccatttaattggcaacgggaggaggcatgcatatttcatatatatagcttatatatggttatataaatcttgcgaattgtgacttacattcgaatcctaggatttattcttgttattagatgatacataaccctacactcctcaactgttgttaagtgacttgggtgtttttaccttaacttcagaatggactgtgaagagagcatgatgtccttaatctgcaaacttgaaagttcaaaccctaaggtggcgcttggttccctcgttttttattttcgttttcggtaaaaacagaaaataaaactaaaaaatatgtttgttaagattatagctagaaaacattttctttgaaaacattttcggaaatgtccttaatattgaaaaagaaaaaaagtcgttttcaacattttcaaccaaaatgaaaacgccgtggcatgcatgtaattttaagcaaaatgtcgtgtgttactctttcctcttcgaagggacttccatctctttcctctcccataatatctccgttcaatctatcatcgtttccgacaatcttctcctcttcgctgctagcttgctaccacctgtaactttatcttcaaccccattccccaaccaaggtaggaagtgaaacgtcccagttacaggtgtacgtacggtattatgttcattattttataattttatttacaaaatgtttattaataaataaatataaatatattcttattattttaaattatcacacaaaatgtttatgatttttaaatcaaaattaatcaaatcaaacttatttccaatgtttttttttagaaaactaaaataagaataaaaaacaaacatgttttctaaattttgaaaatttgaaaataaaaattgttttcaaaaaataaaatgaaaatagaaaacgcctcatcaaaccaagcaccacctaaactttgtcgtgccgaaaaatttaatggaagaaaaaaaatgttattttttataaaataaaagtcttaacaaatcacatgtacacaggaaaagaacagttgaaacaatttatttaggttaactaggttgggttaaatgcaatataaaaattcattatttcatatcaaatttgtgtggattgagtcacgtgataaagttaatatttttttctccttgtttgtgtttaaattttatttgataagcatcattgaaactgttgtttaatccgaggggattaaccacggtggaaatttttattaatgaaccacagaaaattacataagtaaactaacaccatatattataattcaaaatcttaaagtttaggtttatagtttttctttgattatatgatgttgaattttctaattcttatgagacttcattttcacaattgtatttcaataattttttcctcaaatgtgagtcttttatataatagtctctcattaaacaaaaattattttcaatttacaaatatccaataatgttcatagaatttgcttaaccgtaacttgacctaactcatctaaccatttctgttaacatgctatattataatatacttgaattccaactgaaacaatagtatctcatgttaaaatatttgaaaaaaaaaatatcaaatttatatagtgatttagtttgagtttgattgtttgaaaaggagtacatacatgatgctcaaaccaattaagatattttttttattataattgaaaactaaaataaatttcaccacctaactccacctatgttttataaattggttttaatgaggttgcatggctagctgagacaagacccgtataataacctcttaattaaaactggtgtgtctcatttaacctcttgtactcaattattatgcacatggattataattttccatgtaaactcgagaagatatgctccaacggaaaaagatatcgggaaaatataatgttaccacaagggcatggatcaactcgtatagaattattttaatttaattaatgattttaagtttgagttttagatatgtattaaattatttgtttatttaataattttaaatttaaattttagacatataattgtggtaaatatttcacggaaaagttttattgtcaataaaattcttactcacctcaaaaaagatacatgtggtatatacaataaaaaaatatataatgtgctactcgtgtagaccaggaaatatgaacatgtatgtaggagatacagagatatctgctgtcgttaaacctcttaaaagtaatgatcactggatgcattatactaattttctgatgagaattcatctctaataaactcattgctcgaaccaccctgttgggccaacagtacttgcagcagaaaattctgaaaaccaacaaaaagtagataataataactacggttacactatgacagcacataccaatgcaagtgaagagataagtgtagtaaagaacagctagctgtaggccatgttgcatttaaaacacagtaacaccaataaaaataattgaagcttttacaagttctaactaggtgtagttcaaatttgatactttgtaacattatgagtcagttacaattcggcacattgttagaattgactgtaagtagtagtaaatttaaaagtaaaaacattgttttgtattacgagacaatgcatgattgagagtgaacatactcacaacaataattgagcattatataagactataattaagtcaattaattatgtagagctgtataataagctatattatagctgttgatttggtttgtatactaggtcttattaaggttagatcttggtcatggattttaggcccgggggggggggggggggggggggggggggggcggggggtgtcctattcactatttatagaaaataatactactccatacatttttaattataagcctctttttaaaaaagttatttgtttttttttaaattaaattttagatgcattgattattttttctcctaaacatccttacttaattattctctccaaaaattaatgaaaaataattaaatatatagagagataaaaaatgataattgtagaataataatacaaataattgacatatttaatgtaattaattaagttaaccacttttcttaagagacttgaattagttaaaattatcttataattaaaaatatagttaatttagctaatcgtattaaatttattgattgtttatattatcatcataaaataatttttttcttatctctctttttacttaactgtatcttaataatgtttaattagaataattaaataagaatatataaaaaataataaatacatctaaatattagattataatcttataataaaagataaacaaatttaaaaaatatcttattaaaaaaggatgaagtatataacaaggttttaaaactggttgttgcttcgtacggttccttcatattgtgaaaaattgccgacaaatacaattagttcggccttttttatgttgcacccaaattacgaccagagacactccaaaaatcttgatgttgcactcaaaaacaccatcagaccgttttttgaaaatttgattgagcaccatttaagtcatcacttaattcagcttttcttgttgatgtgcagaatcttatttggatatttaagtagtgtgcatgcaccattcactgtaggccatgttaaattttacacacgtaacaccgttaagtacaatcgaacctctgtaaaattgtacacgtagctcaattttcatgaatgatttacaacattatcactagctatacgttgttcattattatctagctagaagagagactttaaataatttgttctaaatattaacattgtaacatcacgtatgcatccggtgtattaacatattacttaatcagatttagcgtaataattaatattaaaccaattaattaaagcgaatccacagaagcgttttcaaaaccgtatttcttgattcattatgtatggtctataaacataaaacataatcgaatgcccatataacacaatagccccaacgattcagataactcaaagcatggcagataaacaaaaatatcaaaaatagatatagcaggagacatataaaacatatacataacatatgcacaagcatatcttccctcacaggggtacacaacaggggcaatacattaaccatcagccacagagcctccaaaatattgtcaagcagctacataaaggctgtccctactagggcctcccgccctggtacctatcagctcggccagaagcatcacctttaaaataacatcccggccccaacaggggtgagataaacatctcagtaaactcagggttcttggaggtctttcctccccctggttcactttcatgacatatggtattaaaattaacataacactaatttgccattacggctctcataaacaatcacagatataccatcacactaaaatgccattaggctctaatcaacaaataacaggtatatcatcacaccagtgtcattccgttggacatcatcaacatcaggaatgcaacaccatacaactcagcataactatatgctccattgcctgaggaaaatcactcaggactttactcatacatatatgactcttctaagagaatttcatccactcatggcaacttctcttagagatacaacctatacataacctggcctgaggaagatcatccattgaaaggcactcattcactcagaactttcacacactgcctaagggagatcatccactgaaggactctcatccactcaggactttgatcacatactacctggggaagtcatccactgaagggctctcattccctcaggactctcgacaactacctgaggaagatcatccactaaagggcactcattcactcaggattctcaaacgatgcctaatgaagatcatccactcaagggctctcattcattcagggctttcaaccactacctaaggaagatcatccactcaagggctctcattcactcaggatttccaacctctgcctgatgaagatcatccgttgaagggctctcattcaatcaggacttacgtcacgtctactctattctattggccagagaatctcaacaacccagaatactatcacagtatatatatatatatatatatatatatatatatacttgttctcaataacacagtacactatcacagtgtacatcctacaggttctcaataacatagcacactatcactatgtatctcataatcatatacctattcatctcggcattcacataacacttatcacagtgtatatcataatcatattctcaacaatatagttcactataattcataatttcaatacacatatatcattatatacgataatcattactccttcggagtatggtggaacacagttagtgggaatcactcccaagaacaaagagcttacctgacaatgcagtactctgctgtccaatccctggactgtgggttctgtcaccaacacccttggtgtcatgccctatacaaaggcacacacaagcaaatatcaacaacggtcctcagccatttcaaaagaaaagaacaacaattctatcttagagttatcagaattactcatctcataggctactcacagaccctcaacaaagtctatttcggcctaatcaaggtcctaaagtctcccaaagactctgtataaatcaattcaattgcctttatccaggccaaatatcaatgattattcaacttggctaaaacagttattccaacacattttcaccttttatttcgcctcctgaacatcttttgtaaaagcaataaggctcatgcatgtcataaggtcaccaatttaacccatatacacactactcatgcatatctcagagccaaaactaatctttatcaatagccatataacaaagttccattttcaccagaacaaagcatacttctctaaagaacccaaacttaattccagccctaacacaaatgggttactattcatcccattaccaatttcacaaatcaatcggtaaaacttaagtttcttacctcaaagcagtcgaggaaggctagaggatcacttctccaagcttcagcgcccttgaatcgcctcctttctccttgaaatccaagctttgttaagttctctagagaactagatctctccaattgattgttattctgaagaactgaagctggaatcttgctcctagaggggttctaatcaacttccatgaaggacaggaagtgtttggatgaagtatggaggagatatgaagctccaaggctcatcaatggcggaacaggacagaggaagaagaaagggggtttttgccctcaaaaatcgcaaaaatggccttttataggccctcagcacgagtcctagcgctactggcgccactctggcgctatccacgctagaaccagagaaaatagactttctggagcacttatggcgctaaccgcgccataactggcgctaatcgcaccacatgtcaaatcatggcgctaacggcgccgctcctagcactaatcgtgccaaaaacagtgaaaattggccttcagctacagtgtcacgctatcagcgtcagatttgctacagtgccacgctatcagcgccagataaaataataagtttttttttttacaaacttgggttattataaacatcaacacctttaatccaagttaattgaagtcaatagtagataaacccaatgataaatagtaaatgagaaagaaagagaaaggaagaggagaagaaaagagtgaaaataagacaaaagagagagaaaaaggggtgaaaggaagaaggaagaaaagaagagaaaaataactaaaacaagagaataactagaacatagaactattaatgggtttaaccctccatcaagcttataattttttctccacttcattctaagatataccttcctccaatctatatcttactccaatctagtttgttctaaaattaaataaaaaaaatccaataacttcaataatattttttttatgaacaaatattaattttattagttttattagaaatatcaattggtgatatttgaattcgtgatttcttttttgtcttcttcttccttcatcattttctaactactatatcaatcttatatttccaatttgataatagagcttaacggtcattacactaactatgtaaaatatttttacactattgtccaatattaattataattcaatgttaatataacttttaaagtaattataaaaatatcaacaactttattatagatagttgtaatgagatgtgatttgatgtaatataaaatttttataccatgagtatatatttttttatcttgacaaaagtagtatgattgtaaaaaagcttttacaagcattataatgacaccatttcttttctactagtggtagccaaagctagccataatttaattagccacaacaaagatcacaagttcacaacaattgttcgagagcattatataagccacctaacattctcgttcagaagcaggatcacagttggagataaggagagcattcaccattttcttgtggtttggtttcctaaagacactaagtactcccatggaacaaaataacaaaagccttatttcttctaaattcttatgtttatgtttgttgatcaccttgatcagcattattgttgctccacaagcggacgcagcacgagcatttttcgtgtttggcgattcacttgtagacaacgggaacaacaatttcctggccaccactgcgcgtgccgattcatatccttatggcattgattctgcatctcatagagcctctggtcgtttctccaatggcctcaacatgcctgaccttatcagttgagtgctcatgcatgctatatgttattaattttaccataaaattatgtttttgattccttacaaaaattttaaagttcaattttagtttttttaaaagtatatttttttttcatttttctccctctaattttaatatgtttatcttttgttcttcaaaatgcatcacttttgaggctcaaaaagtgtgttagattattctttagagggtgaaaacagtttagacagtaagtgagataaaaataaataaacattttaaaattagaggggttaaaactggaaattttagaaggatcagaagcaaatttaattcttgattattttgtaacctcattttgtagttatttttagtttctttcttctcaatattttgttttaaattatacctatatgtgagcatttttaagccgcatgtgtatatagataaacaatttaatcttttaagccatgcacataaagcgtgtcatgtatgtaggtgagaaaatcggctcagaacctacattaccatatttgagtccacagctcaatggtgaaaggctgcttgttggtgcaaactttgcttctgctgggataggaattctcaacgacactggaattcagtttgtaagtcaaaaatagactcacgcacacatacacgtatacatatatatatatatatatatatatatatatatatatatgcccatttttcgtttttctagtaataatattacgaggaattattgatattctttctaatatttttttagggtgtggaaaaatttattaaaaatcaacaatttaatggatcacgcgtataaattaagggatagaaccgttaaatgaaaatagaattcattaaaattggtcatttttcaatgaattttaacgtgttagaaaatagagcgtttctaatattctttgaataatatgttgctgattaaagtttaataagagaatcaatctgaccattaagcagttatctatctaactatctatattttcatcttcagataaacataatccgaattacagaacaattggcatacttcaaacagtatcagcagagggtgagtgcactaattggagaagagcagactcgaaatttagtgaacaaagcattggtgctcataaccttaggtggaaatgattttgtcaacaactattatttggttcctttctctgccagatcccgcgaatatgctcttccagactacgttgtcttcctcatttcagagtatcgtaaaattctggcggtatccccatccttctactctgcttgtatttacgttagatttttttttatttgtagaaattaaatatgatataaaagttatattacacacatatatccttttattaaaataatggtatatttttataggtcatgaagagtgataattacattttaatacattatttttaaacaaaatttattattagttaagaatcataataaattcaagtgaataattataaaaacaattttgaaaataatatacttgttctgttttcttagaaaatcattgatgaacatctaaatccttattgatactttgagagaaagggagagaaaagtatgataaatgatatgataagaaaacgatgaagggaaatgataggtaggtgttaataaaatatttaatatataaataagtttatatatcactactattttttcttgaaccataactgctgctacagcctgacatgagtgggtcatgtaaccataaaaggacgtacaatggctgaaaaaatgagggaagaaaaggaaaattgcatctaatgatcagcttagaaaaataaatatgattgtttgtatcctcatataaaattttatctaatttcctaaacgttataaaaaaattaaataaaaattttatatacacgttcagttttttaaaatatatataaaaaatgaaatatgttctttgctgggtaagaatgattggaaaagaatgttatacaagaatttaaatttattcgtacatgtgaaagtttctgaaatggaataatacactctcaaatatttctttaagagtttacattggttattataaaaagcaatcaagaaaacttttgaatatacagttttttttttattttttaattagtagtgaatattaatttattattatgagagtacttagcacttagcagttaataaatgtttcacaataacagaattcaagaggatcataccaactctctcaaaaagcagatagtgtgtataactactattgtaattatatgggagaagatcctctcatgtctgttatgataggtcatgattgagatgtagactttggaagtcaagcatgttatgttgagattcatttggtagttgaaggcagcgtgcattttgctgattgatattaaaacccacatgaattctgtcactcaaaatgcagcgtaagcattagtgagcacaaccattttacatatggataattaatgcatgccgtctctcctctctctctctctctctacttcgattttaggcagttatagtttatttatctatagtaattactgtatttggtccctctagcagcatttctcttcaacttctctctctcttcttcttatttcatttcaacttttaaacctttttcttcttctgttcactctcttatcctctttatgttttgctattctctctcctaccctttccatcataaggatccaacaataagtcaagtttaaaatatttttttatagacggactttttatacattaaacaacagagattatattaagtttttttacagacatgtgatcatttttattaaaaaaattaatactaattttatttttgttggtgaaatttgaacaaactaaattttagccgctttatccttttgaataattttgctctagatgtttttcttctacaaaagcataggatagaagataatttatgttataattaatatttttgactcggacggatgaaattttgagatatctttacattatagaattaatatccaatttaagatttatttaaagttctttattctttctcaaaaatatgtttagaagctcaaattttactcccaagaaaaatttattagataattctaaatcatcacatatccatgattttttactcatctctacaaacacaagtattttagttttatttatcatgtagaaaaatattagtaaatattaattacttaaaaaaatatttctccatgtgttgctaaccaagctatatccattgggatgatttttgctctgtattagtatattgtaacaaccaattaaatattattgatgcatctagtaacaaccaaaactaacaagattacacaaaatagaaacaacttgtatctcttaaccaagtaatccaagattctatttattagttattgagtatgaaataaattgtattaagagaaaaaatatccattttatatatgttcatggatctgtgacacatgtaaaacaagaaaagaatcttgcaacaacaaccaattaaatatttttgttgtgttaacaaggaaataaatgcactttggcagaatctctatgaattgggagcacgaagggttctagtgactggcacgggaccattgggttgcgtgccagcagaattggctatgcacagccaaaacggagaatgtgcgacagagctgcaacgagccgttaacctgttcaatcctcaattggtccaattagttaacgaacttaatactcaaattggctccgatgtcttcatttccgcaaacgccttcgccatgcatttggatttcgttagtgacccacaagcctatggtatgttaactatgtcattaacctttgtttttgtggtctaatatgttacatccttcctatttccaattagtattaaattatgataggagatataaggttagtttgatagtaaaaaagtaaaaaacaaagggattaattgcataatcgaatctatctcctaataaaaaattaacaaattaactactaatatttgttaataaaaaaattatgatatatggttagtctaaagattatttttttagcaaattttgcaattatagagagaaatgttttttttttcttaattgacattaagagtgtaaaattattttacacttttgactaatcacaaaatgacatattttaaaaaaaaataaattcttattttatctacgttaaaagttattcatatatactataaattgtgaatggttaacaatataaaaaataaaatttgcatttaacgtgtataataattacactttttttttcttacaaaaaaatgtgtgtgaaatgcaccttaaaaagaaaataatatgttgagaaactctataatacgagaaattaagaagaatgagagcttcactctttaaattagattccaatttataactacgaggaaataatttaatgaaggaagcttatttaatgatgtttataagtataaaaaataatattttctttaaatgtgctcattaccttatgataaataattcatagtgtgtaatttgcaacattgattaactgagaggttaatatagaataatatatatttaacatgtgttgacatgcagttaaaaaaacatgttgaaatcgaattattcatctgttgatttgaacatattttattttcttatccacatgcaagtgtataagtctttgagggctgctaatctaattaggatcctttttctcaactttagagcatttgcttattttatatataaaaaaataactgtataattcagaaaaataaaataaaaggagaagatatttaagaacgattgactgcatttatttaccatacccaaaatagactgatttgtaaaaatcaggttaaatggtgtcgggtatttggctaaaggggggaccatgatatatcatggttgctatggcccatggtcgataacaattaaaaagacatatttaagaagcttggtggcttccctcactaaattctagtgtggtcatgcttgctgtaaacattaatattaccacgtggggttcttgcttatatgtaaatgagaaattctttactttattgattgtatgttctctcaatatactaatttttaacccatgaacttcgtgatcaataatgaaaatgtgtttaaaaaaaacttacaatatatataaccttggtttctcatttgaatttttttttttcgtttgattttctaaatttgaaaagttgtattttagtctcttagaatatattattaaattaagttagtcttttttttttcttttttttttttatctaactgtctcactagtttagttaagttaatgacacatgacaaattaaccaaaataaacacattagtacaaaaactgatggaagaattttggtcttgcatgatattttaagataccaaaataaaacttttcaaatttaagagtgttaacattatccttcctatcatttcagtgtgtgttgagacacacgttcaagacgtactcaaatttctctttaagaaaagcacagaaactactaaaattgtaacttttacttagatatgaatcgagtattcttgatgtaaaaccaaataaaaacccaattatgcttttcaactaacttttatcgatttaataatttgagaaatccgcgtgaagcataattgctaagcaatgttcctatttgaaagcatgtattaacctttttattccacacacagggtttgtcacgtcaaaagtagcatgctgtggtcaaggagcatacaatggaatcggactctgcactccagcttcaaacttgtgcccaaacagggatttatatgcattttgggaccccttccatccatcagagagagcaaatagattgatcgtggataaattcatgactggatccaccgcatacatgcaccctatgaaccttagtaccattattgctttagattctacaacctaatgcaccattactatatgagttgtcttcttttgttgtctatgcacacctagtttctacaagatattgtatttttcttgaatgtttaaaactatgacgttaattaattaagtactatttttttttttttatcggtgttcaaatcaacttgcaacttgttatatgtgcaaattctaaaaaattaattcccgtcacgaatgtgtgttgaataacaagacatatattgttgtgttttttgtgattaaataccagaggattaaaaacctctgggagacaagcataaagaagaatcatctcaacacagtagcaatgcaatctggtctaacttcaaaaatatgaaaaccactatttaagctcaaagctctcttagccatcacatctgcatctttatttgtttctctgagaacatgattccatgtgacataaccaatacgactatgcacatctagaatttctgctaccaggttgtggcactgatgatcacaaacacaaccgccctcaagaatatctatagcctccttagaatcggaatcaactcgaagagctatccattgatgacccttgaccaatcaggaatcagataaattcatctccagccacctccaatctttgcacgtatagaagacattcctatgttggcttctaatataacaattccacacctgcttacaatcgttacagtcccggaaaagatgcaagagagcctcagcttcagcttgacatgcagaacacgcttcgttcacactcatgccaattctcattctcttggcatttgtcaaaatactttcatgactaatcttccataagaacattctaattctttccggacctggccatctatgcaccagcttaaataagttaatatcagaagtcactgacagattaaaaacagcaccataagctgacttcacagtaaaggaaccatcagcagttcctttcaaagctattgtatccaaaccaacttctgttcttggagggctcatacctaatatgttacgaacaaaggacacaggtaaataattatgaaaattattgaccaacgaacctccttcagtatcataataacactcaacccgaggcattcaacacatcttccgggatatccctggataaaatactcaataaggaatcacaattcattacgcagtacgttgtctctctagaattttgctttggatccatcaaccaacacacaaaccgtatttctgccgagcacctccaactagcacacatgcctctctagaaattgctcccaggcttattcgtgttaatattaggtatcaaatcagtactgcaaccatacttctcttggataatacctgacaaaggagggggatctctattacataatctccaattagcacgcaacataaaagccatattgacatcgtgccttcctcagacctagaccgactttagccttcggggagcaaatagtatcccttgcaactaggtgaatcttcttgccattatctgtatctccccaaataaatctacgacaagccttgtcaatgtcatcacacaccccttttggaagcaaagtagtttacatcacataagaaggtaaagcttgcaaaacagatttcgcaagggtcaccttaccagcaaaggaaagagttctagatttcctcgtatttaaccgttgatggactttgtcgctatacctttttatgtaaaataggtatccaaggtcatcagtcaactgattgcccatctccttgctcagttgattcctgtgcgacactcaaacattcttagagaaatacatacgagacttctccaaactaatcttctgaccagaactgcaaaataaatttaaaatattctgaatcaagtggacttgctctagagaagcttccgcaaacaaaagcaagtcatctgcaaagaccaagtacgagataggggatccatgtctactcaaccagatgtgcttccaagtactctgataaagaggcaagctaaccaactaaaacagaatcccaatatataagacaaataaatacgacgagagagggtttccctgacgaatggccttagaagtgttaaactcatctaatgcttcaccattccacaacaccctcgtagaattagatgatatacaattccatattaggtccaaaatctcctctggcattcctatatcctgcaaggtgtcccgaatgaattcccaattaagcctatcacaagctttttctaaatctagcttgatagccatccaacctgttcttcctttttttcttttcatagaatggaaaatctcctaggctacaacaatattatctccactctatctgtaaggaacaaaactagactgacaagggccaatcaaatgggtcatacacggtttaattcttagggagagaagcctagtaataaccttatacaccacattacataagttgataggtctaaagtctttcataaaactcatccccatgagagttataaaagtcttatttacctaaacaaccgcttgatgattttcaaaaaccctttgcacgaatttgtagaagtcctttccaaccactttccaatttttctgaaagcacaccgtgatatgctgcaagcatatatagtttttaggttagttttattaggaaaataagtagaaaatattaaataaatgctagaattagtctaaaattcattaatttcatttttattattaattattattattttaatgtctagagcaagaaatagaagaaaagaagcaaaataaagagccaagcaattttggaagctcatgccagtcgtgcaggaacgacgctaaccgtgccagcaacattggagtgtcgcgctagtcatgccaaaggccgtgcgaactgcgcgaacgtcacgggacttttcgaaatttcttttaaatgagataaaactcatgggcttttagggttttataacctagctataaataggaaagtaataggatgattttacaaacgaacacataggcagaaacataaaaagaaggcattgaaggaaatcagtaagagatgaggatcaagaagaaaatcaagattgaggggtttgattactcttcctctttgtattctttctcatcgaccttatcattattgtattgagctagacataatcatgtctagctagttcctctttgattgtggtgaggccataaaccaattgtgaacttttgtgtggattgaattgatattcatgaagtttattataattgttttactttatcttgttctttaattctgattgtcattgatagacttgatcaatctattaggggttctaagggctagaattcacaatagggatattggggttttagtttctgaaagcggtaaagtaacagttcgacattacctagggatagggatgaaggattgcaaagcataatatgccaacttaaagcttaatctaaaaaggcgttactaagggattagaattcttgattaggattaaagggttaaaatgaccgatgaatcagggtttaactaattatataaggcatatctttgaacaattatagtaagtgaaattaattatcaactcaattacataagtagggatcagtggttattgtgctttagccacaattcttcctcattaatgcataatctttaatttcatattgtattcgaatctcttaattctaatttagtttttattataatttccaaattcaaatcacaacacaaagcacaaattactttatttttattcattccaatttaaagataataattacgaataagttagtgtctcaatcctcgtggagacgatactttcttattactttattacttgtacgatcggtacacttgccaagttcgcaacacaccgcttagaatccatcagggccaagagccttgagactccttatctatttgatagtctgatagatatcttctgatgatggcatcctccttaactcttctttggcctcatcccctaattccgaaaacgcatgagatatcacaaaaggattatatacgaaatcctctatatacaagtccgtatagaacctagtgttgggaaaaagataccaatttccccttccaggacctgttatgaatggtcttgcacaagcaaaatactttatacacaaacaataattatgcaagcaatacaacacaatttttaacgtggaaaaccttctcaatgtgagaaataaaaaccacgggaccgatctcggagtccacccaaattcttcactatcaataaagtgagattacaaaatggttccaacaaccattacaatcaatagataactttaacaaaagttgtaccaaaccgtcacaagaggaaaacatacaaaataggcttttgtacgaaattaatttctatcaccagagacaacaacaaacaattcccaacggtcaaactgaccaattgcaagagaggaacacactgatcaaatttgaggacaatccaacggttgataaaagagataactctttcttaatatcattgcctgaaacaagatagaacagagcaggaattttgataacctctatttgcagttgcaacaatctctcttggaacagttcaatgaatgatcctaatggtcataatgtagaaacgaattttagtaaccgctcctcaaattttgaatgcgatccaatggttagtgtgagagaaatgtccctcgtaataacgctgcacgcttcagaaaatagtttcataaccgatttggtttgggaatttccggttatactaaaagcctctattcacgaaaccaaccgttagatgttaatattggtgagtcaaaaacctgcttaaaaagtttcatcaagatccaatggttaaaaaatgagatagagaagattgaattgaaggatgacagtttctaccattctccacatgcgaattttgacggtttctttctcctctccattttctctctattgtggtttcaaattaaccgccaacatatgaaaagacgtaattgctgacctattaaaataaggaacccttatctttccttattggacttggcttgggattcaagcccaacaaatctccctctccagttcaatgagggagattccaaacatcaatcatcaagtgaaattcataccggcaacaacccggcagaattcaaacgtttctctaggaagtgcctttgtcgtcatatctgaaccattatcatcagtatgaactttctctaactccacttccttagcttctagcacatctcttatccaatgataccttacatcaatatgtttggacctttgatgaaaggtagagttcttggctaggtgtatggtgctttggctgttacaaagtaacacatatttcttttgagtgacaccaagctctcccaaaaacttcttcatccataacaactctttacatgcttcagttgctgcaatgaattctgcctctgttgtagaaagtgttatgcacttttgcaatcttgattgccaagaaactgcaccactggcaaatgttaccatataacctgaagtagacttgcgagtatccacgtgacctgccatatcagaatatgtgtatccaacaagactggctcaccaatcccgaatcttagacttaaactagaagtgccacggagatatctcattatccatttaacagcgttccaatgctcctttcctggattagaaagaaacctgctaacaacgccaactgcgtgggctatgtctggtttggtgcaaaccatagcatacatcaaactccctactgctgaggcatatgacaccttagccatatcttccttctccttatcactggaagggctatgttgagcacttaacttaaagtgggtagcaaaaagagtagtaaccactttagcattactcatatagaatttctcaagaatcttcttgatatattgttcctgtgacaagaacaactttttctcatttctatctcgaatgattcgaatgccaagaatcttctttgctggccctaaatccttcatagcaaagtactcactcgactgcttcttcatagcaaagtactcactagaagaatttcttccaacaattaacatgtcatcaatatagagcaacaatatgataaaatcatcatcagagaatttctgagagaatacacaatggtcagaattagtcttttggtttccttgctcccccataacagactcaaacttcttataccattgctttggtgcttgcttcaaggcataaagacttttctttagtttgcaaacataatcttctttccctttcacaatgaaaccctctggctggtccatgtaaatctcctcttcgaagttaccatggagaaaagctatcttcacatacatttgctcaatttctaagtctaggctagcagctaggcctagaaccactcgaatagatgacattttcacaactggagaaaatatctcattgaaatcaattcctttcttctgactgaaccccttgaccactaatcttgctttatacctaggctgttaagtaacttcatcttgtttcaccctgtacccacttgttcctcaaagatctttttcccttaggcagttttactagatcaaaagtgtgattctcatgcaatgaatgcatctcatcttgcatggcttcaatccacttgctcttgtgctctcatcttccataacttcttcaaagcattctggttctcctgaatcagtcatcaacacatactcacttgcaggatatctggtggaagatgctcgacccctagtagatctcctaggaggagcatcagtagtagtctctggtagaggaaactgctcatcaacaatgtcatggttctccatgggttgtggagcatttgtgccgtctaaatcacctataccatgctcttcctcaacttgtggtggatcacatgaaataggaggtggatccaagtcaatcaaatcatgattattctctgatttctctatatcctttatagtctaaccttccataaacacaacatctctacttctcaaaaatttcttctctactggatcatagaacatgtagccaaactcatcaagtccatatccaataaagacacactgtcgtgttttaacatcaagtttggatctctcatctttggggatatgcacaaaagcttgcacccaaagacacgtaaatgatcataggaaacattcctaccagtccaaactttctccaaaacatcaaattgcaatggaacacatggtgtgagatttaaaacatgaacaacaatgctcaaagcctcaccccaaaatgacataggcaattgtgactgtgagagtaaacatctgactctttcaactagtgtcctattcatcctcttcgcacgaccattcaactaaggagtcttaggagacatcttttgatgtcggatgccttgttgtctataataataatcaaaaggacctgtgtactctccaccattatctgttctggtgcacttcaacttcttcccagtctgtatctcaacttaggcctgaaactgcttaaacacatccaacacttgatcttttgtcttcaaggtgtaaacccatgtcttccttgaatgatcatctatgaaagtgacaaaataaagagaaccaccaagtgtttttgtcttcataggaccacaaacatcagagtatactaaatcaagtgtagttggaattcttgaaggaggggaactcttgaatgcaactctattttgttttcctgctaagcaatgagaacacttcttcaatgatgctttcttcaatcctggaagttgctccttgttcgctaaaagagtcaagcctttctcactaatgtgactaagcctcttgtgccacaaatccattgtatcttcatcttctacaacattaattttccctgtagaggtccttgcatgtgtaatatacaatgatgaacacttcttgcctctagccacaatcattgaacctttagtgagcttccattgaccatcattgaatgtgttacaaaatccctcatcaacaagttttcctgttgaaatcaagtttaaacgaatatgaggaatatgtttaacatcatgcaagactaaccttgtgtcattgctagtctccagacacacatctccaattccaatcacattggccaagccatcattacccatcttgacaaatccaaaatcaccggatttgtaagatgtaaagaaatccctgcgagatgtagcatgaatgcttgctccactatctatcacccagttggtctcatgacataaaagattaatttcttcaccatcataaacaaggagaaaatctaaagtagtagtagcaactcgatcatctttaccactttcatcattcttattatctttcaacttcccttgtttattatctttcttcatttttcggcaatacttctttatatgtcctttcaaaccacaatagtgacacttaatattggcaaacttattagacttgcttcttcttgtatctctattcttcggacctcggcttttacttctcccccttcttttggtaactaagacttctgattgagaagatgaaacttgtgtctttcttctcatttcttcatttaagatactactcttcgccaaatccatactgattatagcatcaggggctgagttagacagagatattctaaacatctcccacgagtccggcaaagtaccaagcaaccatagcccttgtacttcatgttcaaacttgattcccattcctgctagttgaagaataattccttgaaatttattcaagtgatcagtcatgaaggtaccttcttgatacctcaacatcatcatctgcttaatcaagaagagtttgttgtttccagtcttttttgcaaacagttgttcaagcttcttccacaacgtttgtgcattagtctcatcactaaatatgattcaaaacattatcatctacccactgcctgatataaccacaaccctgtcgatgaatcaacgtccattcttcatcaattttatttgttggtttctcagtaccaaagacgactaagtgatactccttcacaaaaagaagatattccatctttcctttccatacatgataatttgaaccatttagcgtaaccattctacttgtattaacctccataattaatcacaagtcaacaagcaaaataacacaagctctgataccatttgttggaaaaaagataccaatttccccttccaggacctgttatgaatggtcacaagcaaaatactttatacacaaacaataattttgcaagcaacacaacacaattcttaacgtggaaaaccttctcaatgtgagaaataaaaaccatgggatcgatctcggagtccacccaaattcttcactattaataaagtgagattacaaaatggttccaacaaccatttcaatcaacaaacaacttcaacaaaagttgtaccaaaccgtcacaaaaggaaaatatacaaaataggcttttgtacaaaattaatttttatcaccaaacacaacaacaaacaaatcccaacggtgaaactgacgtattgcaagagaggaacacaccggtgaggacaatccaacggttgataaaagagataactctttcttaatatcattgcctgaaacaagacagaacagagcaggaattttgataacctctatttgcagttgcaacaatctctcttggaatagttcaatgaatgatcctaatggtcataatgtagaaatagattttagtaaccgctcctcaaattttgaatgcgatccaacggttagtgtgagagaaatgtccctcgtaataacgctgcacgcttcagaaaacagtttcataaccgatttggtttgggaatttccggttatactacaagtctctattcacgaatccaaccgttagatgttaatattggtgagtcaaaaacctgcttaaaaagtttcaccaagatccaacggttaacaaatgagatagagaagattcaattgaaggatgacaatttctaacattctccacatgcgaattttgacggtttctttctcctttcctttttctctctctctctcttgtggtttcaaattaaccgccaacatatgaaaagaagtaattgctgacctattaatataaggaacccttatctttccttattgggctggacttggcttgggattcaagcccaacacctagtaaccatctcttccaactttttaggatccaccacccaattaccatcactatctttaatcatatcatacctattcctccttcgacgcataacagtaataccataaaagtacttggtgttgtgatcccccaaatgaagccatttagccctagattttttataccagtgaacttgctcctctgctaggacctgctcatactccttccaaatacttatgtatttcaaatcaagaaagggattaatcccaacacctctcctaatatccaacctgtcaagctcctttttcaaataagctttccttttccacaagcactcaaaagtctccttattccatatctttaactagtttgagaaattataatatttctagaccaattagaagtttcatggagttgctcctatttcctcctaacaaaacctagaaaacattcatgcattaaccaaattgcttcaaactgtaagggcctcctatgttggttccttttggtatgagaatccaaccttaagagaagaggcctgtgatcaaacttcatccatcaaagatggactatcacaacatcttggaacctgagtctccaataaagattaataaggcatttgtccaacctaacccacattctaccattcctcaaagttatactatcaccttggtatcccatgtttatcaaatttctgcgacgaaggaaatcacaaaatgtaacatcctcaaaattatatcttgagtttatatttatgattgaattatggaagtgtgatgataattggatacaagaagaatatggtagaatttatttgaacacaagttgtccaaaaactgtccactactaccacccgttttaaaagaatttatttctctctcatttcttactcaaattaggtgtatgatatatggaagtaaatatctaaatgtcaactataacatataaaaatttcagctaaatctagattgtgtactacttgtagtcacgaaaacactaagagatgtagtgtgaaattttgagctcgctggcagttttggagtctagtttcaaaaatgctatagttagagttttagaaatccaaataaggcatgtgataccttgttagaaagcttaggaagtctagtttaacatactaaaagatgaaaatttatggattggtagattggtacagagtatactaagaacgaaccacatctagttaaatgtttatagctatttgaaaaatctggatttggcaaaacgtgtagctcccaaaattttggcacaaggaataaaagcttcatccaaaacagtaaactagaagcaaaagtgtgaagtgtaggctgttgtaaaattgtgaaggctgaaggaaaaagattaaatatggccttgtgtgtatgtgtaattacaagagccaagtaaataatctcagcatccccaaccatgttccacgtctcataagccagctgcccaagccaatgattaaggaatcttggccaagaaaatctagtgatgagttagaagaatatctcttaaagtagtgatgagttagttaagttttaactaaactaactactaatttagttataatctaactaaattcacttaaaacttaactaattaaattggtataaatagctaatgatacataaaaagaaaagaaaaaattatgcactaagtttctagcttcaaacctcattccacgactacttgtttctttgcactttgcttttcacttcttaccttcttttattgctcacaacagtaactttacatctacatcaaattttattcttttcaagtcttcatcatcccttaaaagatctccaagaaaaacatccacttagtcatttacaaatccaaattcacttgaggtaggctaggcttcaatctttaatcaagaacttatttggactaacctatatgttaaatgatgcagatttatgattgattatttaggctaaatgcaaatgtcattgaaggatattttatgacttgattatgttgatttaacaataggataggttgatgaattaaatgttgtaattttagcaatatttggacttgattttgatgacctttagacttgattttgatggaattttaggctgtttgcttatatgattgtgattggaaatatttaaattaattctatgaagtagaggttgaatggtatggaggtgaaatttctatttactcaagtgatttagttgatagttaaatagtagagttataagttgagaagaatataaggtctagactaagttctaatcttgtcttgagaaggtctaaaggaattagaaaattatttggatggtgaattaaggtttactagtgagattactacatgttgtctgtagcttgaggatattttattgccatgcacaagttggataattttgattaaaataaggtatggtagcctaaccatacatttggtacgtatgattttcgtgatgggaaattttccacgaggttgtgtgaatttgctcgtggattttattattgatgaaaatattggatttaatgtgatatgttgattcatgtttccaagtccagtatgagatttgcgaaacagaatctgatactacatccagtatgagatgtagaaaccaagtgcaaatacatggaaatgacatgcatgactaccgtaagacggctgcaacatttctacatcaagtacgagatgtagctacatacaatacaatacgtagaggtcatgtgcaccttgaaatttcattcatgcatacttgttgtttgggtggttatttattgtatggattttgttggaatttattgatggtttactaatgtactaatgtatttggtggtttagttttgcctactgagaaattttatttctcactagatttgtttcaattttttagatggtgatgtgttgcaaacacatcttagttttaggctagtcttaggatatatttcaattaaatcattaggaattagactaataataggctagttgttgtttatatttaatttaatctcatttcattactcaatgtgtaatttcaggacaaaaagaggagattcaagcaaagaaagaagaaaaccaagccaagggtctcgtgcgggtcccgccagctcccgcgcaagtcgcgccagctcccgcgcgagtcgcgccacaaggcaaatatcaagcttcagttttgaagactccacgctatcagcatggagattcacgcttacagcgccattctgccgcaaagctcgcgctatccgcgtcgcaactcgcgcgatccgtgccatagggtctggaagcagcaattcattcgcgcaatccgtgcgaatagcgtggatctcacgccatcagcgccatgaagacgcagtttcctgatttaaaaagattgagttcgaaattggcacagaacaggggcttagttactctaattaaaccgttctataaatacaaggcttctggactgaagaaggggactctctacaccattagacaccattcaagggcttggaaaccattggaaatcaagaatcaaagctaggttactgcagaataatgtttatttcaacagctttggtgttcttgaagcctatgttaggctaaattctgtattgtggttaggccaagaaccgatgtgaactcctctgtaacttgactggtattgaatgagaatgttttgattgttttattctattctgttcttatttgtcttattcttttttggaattgatcactctaattaagtgctgagagttaggattcgcaatagggatgttgggattctaatttctgatctgattcgaataacagttgttcattgcctagggatagggatgcatggctgcagaactttacaatatattctttgaaatgcttaacttgatagaattcactaagggattaggttttcgattcaagttaaagggttaattggctaagggattaggggttaactaaactagaaaagatttattctctgaacaatcagatacaagcaaaccttatgatatattctttttaatgcttagcttgatagggatcactaaggaattaggattcttgatttaggttaaagggttaaattgctaaggaattaggattaactaaatttggagatatatatcatttgagtaatcaaacttgataaccagttaagtgaaagaggtagggaacagaggggattgcatcctgactacaattattcattccattggtaatacttcaacttcattcttctttgcaatttaatttctttttctgtctttattattcaacattcaacaacacaacaaccaattcttcacaaacattttcttttccctttccaattgctgagcctagaattattgtgaatttcacaccaatccctgtggagacgatacttacttacccactttattacttgaaacgagcggtgcacttgccgttatcgcaacagatggcctcaataatcatcttcattggcatcctatacttggatggtatatagacgaagaaagaaactgctatgttattactatgcacccggttattcgtgcgtatatttactttggaacccattttccagtgttagttcttaacgacatgttcaacctaaatgatccatttttgcaatttgctctcgactaccctgatccaccaatggagcctattaatctgtctaatgatgaagaaagtataggtggaaatttctgaattaagaaatgagtagtaggtgtatgaaaaatgaataaggatcacatcatgtggctaatgggtttcatagtatttctatattttactgtaagatattatggttatgtactacgaactgtgtgacttgtaatgataagtgaagtaacaacgactagcatatgtttaataaaatagtttacaacctatatactttagacgaattttaaattttacttttatacgcttcttacaaattaatagtaataaaaattatctagaaatatattaggtcgttacacaaaaacatcctcagtatcacgatggccataagagtgtgtccccctatgctttcactaggagagagtgttattaaaaacctaaattatagcccaaccaggaggtcacccatcccaagattgctccaagtcaagcatgcttaactgtggattcttatgttatgggctatcgaaaagtaaatgcaccttgttggtataggtagtacctattaaatctttcaagttatgctcaactgtaaagtcccatacctgcacagcctctggatctctctcgttcgggtatgtatttgattcattcatgtacccctcccgcaggagccgctccttgtccgtgcctcactgcaccggcgatcactccccgccctcgtcagcgcccgggatgttacaccaaacatctttataatattcatcgctctctcaccactagtatgaatctctataagaatcacaaaagagggtttatattgcttcatcatatctttgatcagaattccaaaccatttagaagttgttccctgacaattccaacttataatactcataaagaattagtggtttggtttggtaacttagtatcactcacaccttgagatccataccgccagttgtgtgaggatcatgaaaacaataggaatacccacaataaccaagaggggggtgaattggtttaaacttgatcttttaaaatttatttatcaaatcagagttgaaggatcttaatcacttttaaaccaagaatgcttttacttaatcaaagtactcagctcaagaaaccaatagctcaaaacagaacttgtttgttgggtagtgataatgaaaccaagaacaaatgaacaagatgacttgtagaaatagagataaagaaaatcaacacaaacaatttatactggttcacttcacaacagaagctacatccagtttcttctaatcaacactagattagagttccagtattataattttctgttcttacaagcttttcaacagcctttctttatcaacactagataaagaatagaaaatctaaaaccctattagacttctaaagagtaagaacccgagaacactactctgttctttcctagagaacaccactctagtcaaagcatcaagaacccacttacaatagcatcaagtatcagaaattccaaaacgaaattacaatcaaagattattgagagaaacaacctgatgatccaatgaatatgaatgcatatgaattactaatcaaggttgaatagcagaaaacagaaattcaaaacatgctctccatttaaattcttgaagtttcttgcccaaaactcattcaaggctcatgatgattaaagagtgggacaagaaatttgtaaacccaaaaagtcactttcaaactcttcgaaggcttgtgtatgctcagaaaatacgaagtgttcaagttagaaaacaagccaagccttccttctatttataacaaaattttgtaccaacttgtgatcgattacatgtgccaaataattgattaaaaggcctatgtaatcgattaaattgtcacttaaccgattaaagtgttcaaggcacattttgggtttcaacaacgaacaaaataatcgattaatctgagttgtaatcgattaagtcacaaaagtgttgttttagaaaatagcttgagtaatcgattacgaataatggtaatcgattaatgcagcaaagcaagtttttacaaatggcctatgtaatcgattacgaataatggtaatcgattatcacggcaaggcacaaaatacattttatgctatgtaatcgattacaagaaatgtgtaatcgattaaaacattcaccaaagctttctagtttgaaatacgagccatataattgattaattcgatgtgtaatcgattaaaatgttcataaaagcttttccagttttaaacatgaactgaataatcgattaatctgctatgtaatcgattaaaacaataaatttatatttttccaaaaacattactcaattaaatgatttttcaaatagtgagtagctttggtgttttaatgaaaagcattcaagcatgttaatgagtatgtgaatgcaatacaaggatcaaaagattgccttctcatatacttcatttgatttacaatcttcatggcatgtaaaaagctcaaaacaatcttctatgtcataggcttcattcttcatgctgctccccctatatccaacaatctcccctttttggctttgaacatgccaaatatttgattgaccatgtgttagtttttgaagttctttgagggatgaaaagtagaagactttgaactttgtaaacctgaaaacaaatcagcctctttgccaacaacaagtgttaagagatatgcttgcataaacattaatcattaacttgcattagttacttccttagacttaatttgctcaatttgctcccacttacttagataattcattagtttttaatttgtgcagaaaaacacagcacaacaaagtgcaatatttctccccctatatccctatatcaatacagagttatatcaatcaatattttcccccctatttggcttatcaaagataaaaaaaaaatagcacaacaaataatgagaaggagaaacataaaaaacttcattaatcaatagggaggaacaatacaataatcataaaaatagaaaagaaaacagataaaaagcaggaagaggaaatacaagaaactttaaagaaactagaaagaaaaacatagaaatcctaaaaggattcagaaccatcaaagataagttgaattggtctcagccctgtgttcatgatgtagggacagtaagccatccatcttttgaatcataagagattcaaatggactgtaagatggttgagtagggcctccttcttcagcctcttcatcagcttcctcttcatttccagcagtagtagggacttgttggccaaccatttgccatccttgaggggttttgaccatccctagctttgtgagatgtttctccttgatgaggttgttgcttaagtttgtgttgtcaacaacctcattagagacatctatattaaaataatcaatgaacctggaaataagcccaacataaggaaatgggtaattcattaacctcttggacttaagcatgatttcctcaagcataagaatccaattcatctaaattgaattcttgagaccatacacaagttgcaggtcatcatcagtggcttgggcatgattggtggctctaggagtgaagatgtaagtgataatgtagtggaggagtctgtcttcatgggtcataggtgtaacaccccgtaggcctccgaagtgttatcattaataatatcaggtaagcgcttaaaatatgatttaaaaacctcagcggaagcactggatcacttttcttgattcattatgtatggaataaaacatatcatataacacacacaagacaattaaacacacccctgctgatctagttactcataacatacatcataaagacagataactaaaaggcttaggcagattatcaaatatacaatatttatactcaggaggaaagtctcatatatatatcataaatagttctgtacaaacatatacatcacagttcacaccacatcgtggtgatacaaaagaatatctgccctcaccgagggtatacagaactatacatgtatcaagtgtacacacacaccatcccttatcaggggtacaaaagataatcaaaacaaatctgagccttcaagctccatatgctgcttctcagtcaagcagcccatgtctctactggggcctcctgtcctgagactggtctcttcctccagaagagtcacctgaaatcataattccccacacagggtgagataacacatctcagtaagctcagggtccatggaggcatctctccaccctggcccacttccataacacatacatcagatagcacaagcaattggcccactggccctcataacaatataagcatatcatacaaacatgacggagctgcctcaatgcctggcggagctacctcaacgcctggcggagctacctcaacgcctatctcagtgtgagactggcactcacacctgtgccatcccattgggtgctaacccttcgcatggacgcacaatatatagtacctccgagaatagaaggagctacctcaacttctactcccctggcctgagggaaccaattccctgagagctacctcaaccatgagccagccatgctaggaggaacccaccatctcctagggaggtccatatctatctattggccaataaatctatcacaagcacagtcatagcacagaacaagcatagatgcacacatatcattatgaggatgcaactactaatgcatgcatcatgaaatgaccaccactcccccggagtgtggtgtggcacacaagatgggaaatcatccccagggacactgaacttacctgtcaaaggatcactctgtagttctttccctggtctgtggctcctgccaccaacaatctcacaatcaaggcctaatcaaggcacatgtaatcttatatcaaaaccaatcaacagacatccaagtcacagtacataacataacagaattcccctatcctagggttcaaacaaatcaagccatcactaggcttctctcagacctttcaaggtccatcatgtaacgcctctcttgactctctcgtgcttaattgattttaattaaaaactcgtgtccactttgtattaaaatgatcttagctgtaaatttttcacgaaaattattttcttattactttaacttgataattccttcgtaacgtaaacgattttcctcaccacggtttatacaaatacagtacatcaattagaatataaacagtccatattacatgtccataaataaatagtcccatacatatcataggccataaaataaaattacaacatctgtagcacatcatcaactcaaatccatgcacatcttcaatccacatccatgctcagctactactgttcatctgctcgcccaaattaattagggtcatcacaggtgtcaaccacagacacaactcgggtaagtttatgacaaacgtagtttgaataatacacatatatatgtaagcacaaataaataaaatttaatcataaaaagaccacacaacttatacaatatacagatcatcccacgtatacctaactgtgtgatgtataagatgcatgctcatcttttatatgatgcatggctgagatctcagcttatcataaaatcatcatcagtggccacagtcagatagccccattccattggcacacctatccattcagtcggggtagggcaggggcgcgtaggaatgtcacctccacctatgtgatcatcatggtggtgtggtcctccctgaaactcactaccccccagttcacacctctgaacgcatggactcgattcagctatcggacaaacaactccacggattaacccccgcaaggcataactccaccgattaacccccgtcaggcatatgcgtatgaaatgcatgaatgattcattttatctagtcttttaaacatcttttcaacacatcaggcttatttctttcatcacataaaactttataccacagtcttagcatacagccatgattcaccacaacttttggaatccataaataatcactcaacaacacgaggattccaatcatcagcataatcaccattcttaatttgtttctcaacctcaaaatctaatttatttctcaatcatcaaaatcataaaccaccaagcaacatgttaatctttatcaaattatacaacatcactttaacaacacataaaatcataattttcgtaaaagcatttcaatcccataataaagattcaacccaacaattcttaacatagttcattcattagaaccaattatcaaacaccttatgtacaaacttgaaaacatggaatactttttaagaaaagctacttgatctttaatctttatttagttcaacataactttgagaataaataaacttatttcaactaattcctagcattcaaataaatatatatatccttaggaacacatagaaaatttcggccaacaaccaatttatagtaacatattctattaatccattttaacaaccattttccttaaagttagccctactacctctattcaattagattcaagttatttaatcacttaatcatatatctagtcattcttaagcctttgagaaatttaatcaaacactcaggatacaaaacattttgaactcaagcaaggattaataatcaaactaggttcatcataaaccccccataccttggcttctttggtttgaaacttagctatttgtcttcaaagctcctagctcttttcacgtggacttctttagggtgtgacctttgttttggctttgtgttttaggtgaagaggatgtggctgtatggaaggttttttgccgtgtaaaatcagcccaccaaccttttatatgctaagttaataagctttaagtgaaaatatcttcaaaagccatgattgttttgctttttggttggatttctttcattggttattactttgctaccatacaagtgtccttgatcaagatttttccacaccattccatttccacctatcatagcacgtgtatttgcttcagcaaggtgtattccatttgattttaattcaaatccgtaggtagctttggcttaatagatttcttcatttttggaaaaacctgtttctgtaaaataataattctgggttcgttaaccgttggatcttcttaaaattttaatgatatacttctaacttacatatatagcttttgaccattgggatctctgaaataaggcctagagatgtctacgttttctgctcaaggaaacaaaataaaatttacttcaaatatcttttaagcatttatgactagctttccatttggaccaatagcaagttcctcagcctcttaaacatccatgtgtctattcttgaagtttcttagagcttttcttcattgatcttgcatcatactgccaaagcttgtattaggaattctagtcaaccaatttttccttcaattacatgtaataacttttcttgaattcttattggtccgttttgctttgaactattaaaattgctaatctaacttatttaaagcacttatccctgtcataattaagggaaaattctatagatcttgtccatactggtcttataattttctgatgcctagggtagtctaaattaagctcttttcatcctatcttccaaaattcgtagaaattttattttaaggttttccgccaccaacctcactgatactgggttttctaaaagtattttatccaatggtgaagttcccacaaatttctaaagtcatctggtcagtttttgacctaagggcattttggtaattttacccctcaccctaggggtataattgtcatttccaaaaaattgttcagaatatctctgtaattgtcaccctaagggtatctttggttatttttaacccatctgagaatatttataacatttcttccttaaatattttatcggacttcctagggcaatttggtcattaataaaatatcaaggggtattttggtcatttagtgccttaaggacctatctgtcatttttgaaattgtccaaggatattttggtaatttctcctagggatacattggtcatttccagaattgttcaaggcaaaattatcattttcatcctagggacataaatgtcatttctgaaattgttcaggggcgttcttgtcattttgtcctaaatttttctagagcctttcattaacattttactcttagtaattgtctataattctctaattttttggggtgttacacatcatggctgcatacaaagcatctgagtcatcacagactcaatgcacaacatctaccagaacatagactcatagtagcctcaaggttccagaatcactagaatggcttaaatctaacccagacaccattccactagcctctcaggctcaacacaagcataatcaaggctctggaatggcttcaaaaccacaagtgacttatcacacaagccacacatacaagccacagagccaagattcaaagttttctaaatcagaaactgaaagctaatccttcatcactaaaccattctaaacaagtttgtctacaggaccctgggctaattctagccccagctcaagtgggtcactattcatagaaaccctcaggatcaaaattaaacgaagaaacttgagtctcttacctcagtggtgactagaaagacttcaggatagcttcctcaagctctgttgtccttcccaagccgtgggtcctcgccagtctcaagttctctgagcttttccttgagaatccaattctcactctcaaggggtttttaagaaaaaggatgaaggattcaagctctcaaagggtttctctcacaatcacaagtcaatgggaggtgttttagccaagccaaaaggtcctagaaagcttgggatactttctaatggaggctggggtcgtggggaagaagaagcacatattttccccttcactttcgagtttttggccttatatagtggccctgcccgagctctggcgcgatccgcgccaactcccgagctacccgcgccgcaatggcggtgggtctgacgctcccagcgccactcccgcgcctccagctccagcttccaaaacctgtggcgctatctgcgccaaccttgacgctggccgcgtggaaaaccagagaacatgagttttctaggccacttcccgcgccaaccacgctgcccctggcgcgaattgcgctggctggaaaacctctggcgcccttggcgccacattgacacccctggcgtcagcttccagagaacctggcgctcccagcgccatcctggcactcctggcgccatattgcagtggatctggtgcgatcagcgccaaccctggcaccatccacgccacacccttaacagagttttctgctaaataaacctggcacaaaagtgagggtccttacagtagggccagtgcttagcctaaacttcagcctcatttggggataaagaagcatccccctataggtctcaaccctattataccccccagcctcttcttcaaattttctttccccttcaaaggaaattccagccactgcttcccaaacttttgctgtaatttccatggctactccatttacttgggactgaagagtcccatccatggaactcttagcacaggtgtagaacacctttactaactcagggtaataggtacccttcatctcaacaaactttctcaatccttgggtttcaagaaaagcagggaattgaaagccttccctaatgaaccattcaagtttaaggtgtttgggaggacatactatttcggtggcattgaactgaaggtaggtcatcttgtctctttcagcaggaaaccagtgatctaacctattgacagcagggttagagctttcaccagcctttcttttggagcttttgactctcttagaggtagacatggctaatgagggatgagagactatctgggtagagtttctaaactcagagggaagtagaacacaacagtgttttaagaaagaagaagaagattggtgtgattttttccttcaacaagggctgtatttatagaagattttgggctccaaagattcaaaatttgaaattaggaacagttaatatgaattaacccactaccattaaggcacaaaagattcaaatttgaattaggtggcagttgggcagttataatttccaagaaaatctagcatattttgcagtaactttatgaataatcgattaattcgtaggcaaaattagtttctgcagaagttgtaatcgattaatttgtcatgtaatcgattatttcagtgaaatccaattactgaagataagtgtgatcgattatttttcttatgtaatcgattattataaagagatttgaaatacataatcaatttgaagcttgtgtaattgattaatttgatttgtaatcgattattccagaaggatttgaatttttgaaatagtttctcaaacaatttaatcgattaccattcactataatcaattattctagtggatttaaaattttgtaaaaggatttttaaactgtgtaatcgattaattcgtcggttaatcgattattacagaaaaatttattttctggaattatttttctaagaagaataatcgattattttgcttgtgtaatcgattacataagcacaaattttattctaagccatgttttaagttcatttaatcgattaattagtgctctaatcgattattacagtgaaaacatcagaatgaacaatgttttaagcagcacaacttggaatttgaaggcacatgtgatgatgggacaagtataaagctatttcccataaataagctcacaacaatcatgctaataaagatttgattcatccaagataattagcatgtttctaagagtatagaatctatctctagccaaaggtttagtgaatatatcagccaattgattgtgagtatcaatgaagtcaattttgatgttacctttttagatgtgatctctaaggaaacgatgccttatctcaatgtgtttggtccttgagtgcattattgggttcttggaaatgttgatagcacctgtgttgtcacatagcagaggtatttcttttaattctacaccaaaatattgtaattgttgctttagccataggctttgagcacaacaacttccagcagagatgtattcagcttcagctgttaataaaacaacacaagattgtttcttgcaatgccatgtgatcaatgaacttcctagtagatgacaagttccactagtgttttttctatccaacttgcacccttctttcctttttcatctgaatcaagataggttgatgttgccattggagtttcagcattcttgcttttctccatttcaaattttttgatcacttcaagacaatacttgacttgatttagaaatgttccattcttcatttgcttcacttgaagtccaataaagaatgttaattctcccatcattgatatttcaaattcattttgcatagagatagaaaattctttgcatagcaattgattagttgaaccaaaaattatatcatcaacatatacttgaacccataagatatcattcttttgtcttttgatgaacaaggttttatcaacatgtcctcttgtgaaagattgttcaaacagaaatttgcttaatctttcataccaatatcttggagcttgttttaaatcataaagagcctttttaagtttgaaaacatggtttggatgtttgaaatcagtaaaaccgggaggttgctccacatatatatcctcctcaatataaccatttaagaaagcacttttaacatccatttgaaaaagtttaaaatccattaaacatgcatatgcaaataataacctaatggcttccaatcttgcaactggagcataggtttcctcatagtcaatgccttcttcttggttgtaaccttttgcaaccaatctaactttgtttctgactctgattccactctcatcaactttgtttctaaaaacccatttagtgccaatagatttgagagaagaaggtctaggaacaagttctcaaacttcatttctcttaaactgattcaaatcgtcatgcatggaatgcatccaatgttcatcaattaaggcttgatcaatattcttaggttcaatttgagaaacaaaagccatattacaatagagatttcttaatgaagatctagtagatactccctttgagacttcaccaatgatattggcaagggatagatctcttgtagttctccaatcttttggctcttggactgttgttgatggttttgtttcagcacttggttcttctttttctttattcattgaatcattaagctagataaactcttccaaaggacctgcatctacatcacacttcttttcctccttggagggattaaattcatcacaaatcacatgtacagattcttccatgcacaaagttcttttattgaaaactctatgctttagtatgtaatgaatatccaagaaaaatgacttcatcagctttagcatcaaatttttcaagtgattcatttccattatttaaaacaaaacatttacagcaaaatgctctcaaatgagaaatgtttggttttctacctttgtataattcataagggattttctttaaaataggccttattagcaatctattcaaagtgcagcaaactgtacttacagcatcagcccaaaaatatttaggcaaatttgtctcattaagacgagttcttgcaccttcttcaagtgatctattttttctctccagaacatcattttgttgaggtgttcttggagctgaaaaattgtggttaattccattttcttcacagaatttttcaaaatattcattttggaattctccaccatgatcacttcttattgagataatgcttcccttttcattttgagcaagtttggccaattttctaaaagcattgaaagcatcactcttggatttcaaaaacagagtccaagtgaatatagagtaatcatctacaatgacaagcccatagtaattacctcataaactcatagttctagaaggaccaaacaaatctatgtgaagtaattcaaggggtcttgaagtggaaacaatatttttactttgaaaagaattttttgtttgtttccccttttgacaagcatcacataatttgtctttttcaaacttgagtttgggtaagccaatgactaaatcctttttaattagcttgttcatatgatgcatgttaacgtgacttgcccttctaagccatagctaagattcaatgctcacgaatttaactcttgaagatggaggatttgtcacctatagagataacaacaaagggaagatcattggagaaagcaatataggagacaactttaaaaccaaaattagaaatgttctttatgtggaagggttaaagcacaatctcctaagtataagccaactctgtgataaagggttcaaagtgtcattcaatgacaattgctgcatgatatgtgatggacaaagtggtgaggtaattcacataggtaaaagaaaagataatatctatttactctccatagatcatgcattccttcacaacacttcttgcctaataagcaaaattgatgaatcttggctatggcataaaagggcaagtcacattaacattcatcatatgaacaagctaattaaaaaggatttagtcattggattatccaaactcaagtttgaaaaggacaaattatgtgaagcttgtcaaaaggggaaacaaacaaaaaattcttttcaaagtaaaaatgttgtttccacttcaagaccccttgaattacttcacatagatttgtttggtccttctagaactatgaatttaggaggtaattactatgggcttgtcattgtagatgattactctatattcacttggagtctgtttttgaaatccaagagtgatgctttcaatgttgttatctccataggtgacaaatcctccatctttaagagttaaattcgtgagcattgacatgtcgccagtcatatgtctaaagcatccactatcaagataccataatgaagatattgctcttagacataactgcaaaattcaaatcaatttatagaggaaggtacccaattgagattaggtccataggggttagttacttttttcttcttttgcacccaaatacattctccattaggcacatagaatctcctagcatagcatttataagatgtatgtcctttcatcatacaatatttgcatgttacagattttgatgattttctcaagtaagcattttgattgatctttgagttattgaaattcttttgatctttctgttttggtggtacaaatatagttttgccaaaagactttgagccttgtttgtaacccaaaccagaagtatctccagcatatttctgcatactcaacatttcaggcaagttgcatttacctttgtaaagctttctcaaaagatcaatcaaatcaatattctttgataagagtaacatgtatttttctccttcacttcttttgtaatcatcaaaatccttttgcaacatattatatttgtcaacattagatgaagaagaagcacatacacatccattcattttgtaacttgaaacaagtttttcattttcttctttcaagttgcaaatttcagtttacaattatgtaatttttgcaacatgccatttaagatttccttttaaattattattggattttgcaagtttttgggcctcttcatgcatttcttgaaaagcataaataacttgatcaagttcaaagcttacctcagtttcagcaattgagagatcatcatcttcattgattgtggaagtgagacacatatttgcttcttcattttcagttgaggattgagaagttgttgacctcattatcttcccaagctatataggccctcttagactttccttccttcttcatcttattttcaccttgttgctttttcaaaaagatagagcattcagatttgacgtggccagactttccacattcaaagcaagtgaagttgttgtcactcattttgttgttgttgttgttctttgtgaactttctgttcttgtttcttctcaagagcttgctaaacttttttacaatcaaattcatgttgtcctcttcattttcttcacttgagtcttccactttttccacctttgaggatgcagctttcaaggctatgtttttgtgtttcttctctgcatcttctgcattgtttagttgtgacatttcaaattcatactcaagaagcttatcaaatagtgcagccatggacattttggatagatcttttgattctttgattgctgtcacctttggttgccatggtcttatgagacacttcaagattttgatgtttaactctttagcatcaaagatctttccaagaccaagaagatgattaactatatgagtgaatcttgtttgaagctgagatatgctttcagtggtgttcatcttgaacatttcatactcatggattaagaaatgttttcttgatcttcttacttcatctgtagcttcatgagttatctctagcatttcccatatctcctttgcacttgtccacctaatatttctaaagaattcatcagagaaaaatgcagaagtaatcatattcttaaatcatattggacaactctcttttcaacatctgtcatttcatcccattctttgggaatcatatcattaccaccagtttttataggaatcacaggactttttctatatcgttccaagcacttgggtcatttgattgaataaagatttttattctatttttccaaaaattgaagtgctctccttcaaacattggaggacgattgagggaggcaccttccttgaaggtaatttgtgtggtattcattttctttttaaagaaagataatgatcttgaataacactcaagaacctgctcttgataccaattgaaaacaataggaatagccacaataaccaagaggggggtgaattggtttaaacttggtcttttaaaatttatttatcaaatcagagttgaagggtcttaatcacttttaaaccaagaatgcttttactcaatcaaagtattcaactcaagaaaccaatagctcaaaacagaacttgtttggtagtgataatgaaaccaagaacaaatgaacaagatgacttgtagaaatagagataaagaaaatcaacacaaacaatttatactggttcacttcacaacagaagctacatccagtttcttctaatcaacactagattagagttccagtattataattttctattcttacaagcttttcaacaacctctctttatcaacactagataaagaatagaaaatctaaaaccctattagacttctaaagagcaagaacccgagaacactactctgttctttcctagagaacaccactctagtcaaagcttcaagaacccacttacaatagcatcaaatatcaaaaattcccaaacgaaattacaatcaaagattatggagagaaacaacctgatgatccaatgaatatgaattaccaatcaaggttgaatagcagaaaacagaaattcagaacatgctctccatttaaactcttgaagtttcttgcccaaaaataagtcaaggctcatgatgattaaagaataggacaagaaattagtaaacccagaaagtcactttcaaactcttcgaaggcttgtgtatgctcagaaaatacgaagtgttcaagttagaaaacaagccaagccatccttctatttataacagaattttgtaccaacctgtaatcgattacaaggaccaaataatcaattaaaatgcatatgtaatcgattaaattgtcacttaatcaattaaagtgttcaaggcacattctgggtttcaacaacgaacaaaataatcgattaattcgagctgtaatcgattaaatcagaaaagtgttgttcagaaaatagcttgagtaatcaattacgtataatggtaatcgattaaagcagcaaagcaagtttttacaaatggcctatgtaattgattacaaataatggtaatcgattatcacagcaagatacaaaatacattttacattatgtaattgattacaagaaatgtgtaatcgattaaaacattcaccaaagctttctagtttcaaatacgagccatataatcgattaatccgatgtgtaatcgattaaaatgttcataaagcttttccagttttaaacatgaactgaataagcgattaatcttctatgtaatcgattaaaacagtaaatttatatttttccaaaaacattactcaattaaatcctttttcaaatagtgagtagctttgatgttttaatgaaaatcattcaagcatgttaatgagtatgtgaatgcaatgcaaggatcaaaagattgccttctcctatacttcatttgatttacaatcttcaaggcatgtgttgtgcgatttatgcgaatgaatatacggcaagtgcaccgatcgttaacaagtaataaaagtgagtaagtgagttatcgtctccacagggattggggtaattttcacaataatattaattctaaatgattggaaaataaaaacagaaaaataaagaacaaagaagtaattggataaatttgtggttggtgtttgaataaaaacagaaattaaagtaagtaaaaagataaagaagttaccaatggaagaaacaattgtggtcaggcacaatcccctttgttcctacctccttcacttgattggtttattatcttaggtcacacatttgataaatctttcctaatttcgtaaatcctagactcttaagagcattaaccagcgatttcaccctttagttcgatcgagaaacctaaacccttagtgaatctgtcaaactaagtattcaaagaatatagctcatgtgatcttgttaagattattcggaggataagcggcaaaagaaccgaaagggtgtttttttaaaaaatatttaccgataaggtgcgctttcgaaactatttacaaatctggtttgggagggcaattatttacaaatctagtgctgtgcaacatgcctggattaggcatgttgcaacacgcctagattgggcgtgttgtaacacgcccaatctaggcgtgttgcaacatgcctaatccaggcatgttgcacagcactagatttgtaaataattgccctcccaaaccagatttgtaaatagtttcgaaagcgcaccttatcggtaaatattttttaaaaaaacaccctttcggttcttttgccaggataagcctttcctaagttagttaatccctaatgtcttagtgaatcaaccctttaacctaattcaaaaacccaatgtcttggtgaattctattaagttaagcatgaaaaagaacatattataaagtccgtaaccacgcatccctatgtctaggcgaagaacgactattattctaaacatgtcagaaattagaaccccaatgtgtccattgcgaatcctaaccctcaatacttaaatagaatggccaattccaaataagaataaaacattaaaaagcacagagtagaataaaataatcaaaacagcattagaatcaataccaattcaagttacagaggagttacatcagttcatggccttcccacaatacaagttcagcttgccataagcttcaagaaaccaaaggctgtcaaataatacactcttggtgaccttgccttgattcttgacttccaaaggtttagaagtgtgaagagagaaatagatgacacccaagggtggtgtgtattatgtgactctctagaggcctttatttatagatagatctaattagggtaacaaggcctattttctgttccaaatctaaatcaaatcttcttaattaaggaaactaaatatatttatagaatcctttaattaaggcaactaatcctaatatagtaccaaatctgaaaatatatgatttaaataaggaaactgaatcgattccacgcgacccgcgcgcgatctcacgcgagtcgcgtggatgggcagagaggatggcgcgtgtcgcgtgatgtatggcgctacccgcgcggcttggcagagggaaaattacttccagacttcttggcgcgactcgcgtgaattcccgcgcgatccgcgtgggactccagttttgcttttcttctttcgttggccttgaatcctcctcttttgacctaaaaatgcataattggtattgaattagctttaaaacaattaaaatgctaaactttaactaattctaacctatttaactactcatttaactaaattctaatctaaaactatattaaaaacaagatgtgtttgcaacacatcagcatgtaaaaagctcaaaacaatcttctaggtcataggcttcattcttcatgttgttccccctatatccaatatatcaacgtccccatcatttgtaatcatgacatccatgggttgttctaacttatctcgggaaggagtagcaccctcctataaattacttctacttgagacgtaggctacaacatcctcatctatctgaacttgaacacaatgaactatacctcctccactgttagaattgggaaatttttcatttttggaagttaaaggctctcatcatagttttgtttcttcttttcctcaactggcacttctttcacactcaccatggcttttaccacaacacccacctgctccttatatttttattgtagaagtattattcttcttaaaaattttcttccctcatttattaagttcttttcattttccttcttgcggattcttccaaacaaatacattccgaaacttgacttgtttctccttatctctgttgaaattaatttgcatcatttgagatgctaatatgagtgccatattctttttgcttcttgacgcagccaaagaccttcacgtgggtagtcttatttctagaattaaccttcattgttgcacctgaattatcccctgcatggaccctacactttaaattaaatgttgcttcaatatcagcataatttgtggattcaaaaacttgtttcccattaccggaaataaaacgaaatgagatcctatagttcttgaatttccagattccttagagttaataggaatctttttgttagataaacaaaataatctaatcacgcttatatacatatgaagctattagatcaaatgcgaaaaaattaagatcataaatactttccgccattgctattcttatttttttcgaagattggttgaagttgtctctaagttaagtggcccaagagtcagataatccgtgaacaatttatgagtctccaaactaatatgacttttggcttaaggatcttttatgctctaactatcactcactgatggtgtattgagatttttcagatagcaagcataaggaccttggccatggtgcacatctccttttataactttttcccattaaagaggttgttttttttatctgcataaaacaagggcacaattttgttgaaaataagggataagatcaacaacaaattattcctaagaagacggggtgagtgtaccaccttttgtgattttgacttagtcaagcaacagaaaaaaaaaacaacattctcccacttggtccacatatatcatcatacactttagtgagaaataaaatacgtgaatcatgacaatagttcctctaatgtgtacgagtattatcttccatgtattacattgcattatatttctcaagcccatacaacttaatgaataaactcaatgtttattctaggtccaaacttaatagatgtttctcagaataaataactgcaaatgcgcataaactaaatgaaaaacatcacaatgaagtttcttaacatcattcttacaatgaaaatcacatataggaaccaagtcccatcctttccacatgatccgtaaatttaaatggtgacatgcccttaattaaaggatcaacaatcattaattcaatactaatgtgctcaataaccactgcattatctttaacacgttctcttatggctagatacttaatgtcgatttgcttgcttcgactaccacttttcttattcttagccattaaaacagtaactgaattatcacaatatatccttaatggcctagaaatgaaatccataactctaagctcataaatgaaaatcctcttccatacaccatatgaggtagcctcaaaacaagaaatgaacttagcctctatagtggaagtagcagtcaaggtatgcttgacacttctctaagacacagctccactagctagcataaaaatatatcttgaagttatcgacttcaacgcagctagcgtagtctgaatctgagtagccaatcacttccaagttgtcagtccatttatacataagcatgtaatccttagttctctgaaggtatcttatcactttctttgcaactttccagtggtctaaacctgggttactttgatatctccgtaacactccaaccgcaaatgcgatatcaggtcttgtgcagtcctgagcatacataaggcttccaacagttgaagcatgaggaatgttcttcatttgtttccgctcaagatcattttttgggcattggcttagatcaaacctatcacccgtcacaatgggagctacacttggtaaacaatcactcattctaaatcattccaaaactttgttaatataggtttcttgagacaaaccaagaacacctcttactatgtctctatgtatcttgatgccaataacgtaagaggcatcacccatatccttcatatcaaagttcttagaaagaaattgtttcacctcatatagcaaacccttgtcattgtttgcaagtaaaatatcatccatatataaaataaggaagcaaattttgctcccactgaccttctggtatatatagtgatacataacattttctacaaaaccaaatgaagaaataatatcatggaattttaagtacaactgatgggaggcttgtttcaatccatatatagatttattaagcttgcataccaattgttcacccttagtagaggagaatccttcatgttgtttcatataaacctcttcctctaggtctccattgagaaaagtcattttcacatccatttgttgcaactttaagtcaaagtgttcaaccagtgccagaatgatgcgaagagaatatttcttagatacaggtgagaatgtctccttgtattcgattccttccttttgattaaatcccttggctataagtcttgctttatatctctcaatttttcctaatgagtctttcttagttttgaagacccatttacatctaatggcttttgcaccatcaggcaactgaacaagatcccagactccatttgatgccatacaattcatctcatctttcatagcatcataccacaagtttgattccttagaactcatgtcttgtgaaaacattttaggatcatttttagctccaatattatagtcagattcctgtagatacacaacaaagtcacttggtatcgttgatttcttttttctagtatgatcaacaatttcttcttgctcctcttgaacaatttgatctactagattatcaacatgttgtggatcttgaatgacaggttgcacaacagtcggttgagctggaagggtattgttaataacaactaatccaagatttgaagtcgatggttgagtaactgaatgatctttctcagaaacaaaatctctagattgatcgctcccactaatcaattcattctcaagaaattcaatatttcttgattccacaatccttgtactgtgaaatggaaagcaaaatctctatcccttagacctttcaacatatgaaatgaagtatccaccaatggtccttgggccaagcttctttttttatgggttatagattctcacttcaaacgggcatccccaaatgtgtacgtctcaaactcggtttccaactcttaaataactcaaacagtgtctttgggatagccttagttggaactcggttcaatatgtacactgctgtaacaccccgtaggcctccgacgtgttatcattaataatatcagaatagcgtataaatattaatttatcagttcagcggaaacataggatcgttttcttgatacattatgtatggaatcacacatcagaaccataaaatcacgcccttgctgatccagtttatcaaaacaacataaataagacagataacagagcttcaggcagagtaacaacaatataaacatacacatgtactcaggggaaagtctcatatacatatatccaggttctgtacaagatatatacatcacaggttcacaccacacacagtgctacaaaagaatataatccctcagaagggttatacagaactaaactcaaaacataatcaaaatggagccttcatgctctctatgctgctcctcagcaaagcagtctagtctctgacgggcctcttgccctgagactgctcttctcttccagaaggttcacctgaaaccacataaaccccacacggggtgagataacatatctcagtaagctcaggatccatggaggaatctcctccatcctggcccactatcacaatacacacacacaaatatcacaatcaaatggcccactggcctagccctctggctttctcaatcacacaacatatcatacaaggtgactaaacatctcagagcaggaggaaatcatctcctgtaatcaagtcaccaaataggaggaaaccatctcctatatccatcacaaagcaggaggaaaccatctcctggaatgggaggaaaccatctcccagtgtgaggccggaactcacacctgtgtcatcccaccggacactacccttaacggggatgtacacatatggtacctccgagaatagcaggaaaccatctgaactattcccttggcctaggggatcatcatcaccccgggatcatcatcacccatgagccagccatactaggaggaaaccatctcctagggaggtccatatcaatctattggccaatagatctatctcaagcacaatcacagtccataatacaatcatacctcagcataaccagcatatatcaagcacagaggcatatatgtcatcatcaccagaatgcagatgcaatgcatgtatattatgatatgaccaccactccccaggagtgtggtgtgacacacaagatgggaatcatccccagggacactgaacttacctggaataatatcactctgtggtctggtccctgctctgtggctcccgccaccagtgtaaggactttcattttcggcgcttaacccctgctaagggtgcggcgccggtggcaccaggattggcgttgatggcgccaaaggtaatagctttagaattcgtgaaaggtgcttaaaatgcaagttttatggtggttctggcatatggcgcgacccacttggggtgcggcgcgacgcgcgccatatgtgtaatatagggcagatgactctgccatgtcacgcgagtcacttgacgatccacgcgagtcgcgtggcaagtggtccagaaatcatggttttctctggagttccacgcgagtcatttgggatccacgcgtgtcgcgtggaaggcccgaatgaatggcgcgagtcgcgtggtgaaacgacgcgagtagcgtgggaagtggctcagaaagggcatttctgtctgccatctcaagtgaaacgcgtgggaggtcaagtgagtcgcgtgggaacgtcggcagaccagtttttaaaggaccagaacgtgagaaatggaggaaaataccatttcttcttcctcccttgagccaacctccattgttaaagtccttgagcttcctaggacttgatttctcagcctaaacactttcttgagccttagaaacttgattgaaccgattagaaagcttgaatccttcatcaacttccttgaaaaccccagattgagtgagaagaggaacctcagagggaaaagctcagagaactcgagcttggcgtaaaaccacagcgtaattggaacgtggaagctaggagaagctgttctgaggctgttgggtgcgccactgaggtaagaaacttagatttcaccgtttgattttgattctgggggcctctgtgaatagtgacccatatgagctgggactagaattagctcagggtccagttgagaaagttgatcagggcttagaatagatgaaggattagctttcagtttttgatactgatgactttggattgtggctctgtggtttgtctgtgtggcctgtgtgttgaatctacagtagtgtagaggccattccagagcctagtatatatcaattataagcctgtgagactagctgaatggcaccctgacggaggttaagccattccagagggatttgagtttgtggaggctgatgaaataaggccatgtctgtggatgttttggtgatgagtttagcttgactcagcagcttggcctctagcctgaaagaccttgtgaaggtctctgagtagtcccaagtggactaagtttgataacaccctaggataggggatttatgttgtgttatgttttgtgattgtaaaccggtgggctggttgtgatctgaaattatatatgctttgatcaggccgtgagcttgatattgttggtggcaggagccacagacctggaaaggaactacagtctgagaccttaccaggtaagttcagtgtccctggggggtgattcccatcttgtgtgtcacaccacactccaggggagttgtgggcatttcataatgcacgcatggatatctgcattcttgtgatgatatatgtatgcctctgtgtttgaattatgttgtgattgtgctgagatagctctattggccaatagatggttatgggagatggcaattcctcccaggagacggcaattcctccgacttgataaattgatataggagacggctattcctcctattattgaatactagcacaggagatggctattcctcctgttatgagatattgataagggagatggcaattcctcctattttatggcattaatacagaagatggctattcctcctgccctattgtgttgattatgcatgtatgttatgttacaatgttgcataaatcagaggcgaggccggtgggccatctacttatgttatttgttgtgcttatgatgatagtgggccagggtggaggagattcctccatggatcctgagcttactgagatatattatctcaccccgtgtggggtttatgtggtttcaggtgaaccatcaggacgagaagagcagtctcagggcaagaggcccatcagagactaggctgcctagttgaggagcagtatagagagcttgagggctccattttgatgtattttgttatagttttgtataccccttctgagggattatattcttttgtagcaccgtgtgtggtgtgaacctgagatgtatatatcatacagaacttggatattatgtatatgagattttcccctgagtacatgtgtatggttattttgttgttactctgcctaaagctctgttatctatcttattatgttgagtttgataaactggatcagtaggggcatgatttttatggttctattatgtgtttccttacataaggtatcaagaaaacgatcctatgtttccgctgaactaattaattgatattttatacgctaatatgatattattaatgataacacgtcggaggcctacggggtgttacaaccagtaacctcagaatcacggcctaatcaaggcacatgtaatatcatatcaatctcaagaccacagacatcaatcacagatcaaacatatatataattcccctatcctagggttcaaatcaaactcagcctacaccaggccgctctaagaccactcaaggtccatcaggatggaatacaatccatctgagtcattctagactcgccgcacatatacataactaagccttactcagcctcacaattcaattgttatcagaagagggccgaggtcctctcaaagccctgctctactagcctctcagctcagagcatcacaatcaaggctctagcctatcagagaaccatcaacaagtgactctacataagtcacacaggcatatacagagccaagattcaaagttatcagaatcaaaaactgaaagctaatccttcatctactctaagccctgaacaactttctcaactggaccctgggctaattctagccccagctcatatgggtcactattcacagggacccccataatcaaaattaaacggtgaaacttgcgtttcttacctcagtggcgactccaacagcctcagaacagcttctcctagcttctatgttccaattatgctgtggttctgcgccaagctcgagtcctctgagcttttccctctgaggttcctcttctcactcaaattggggttttcaaggaatttgatgaaggattcaagctttctaatcggttcaatcaagattctaaggctcagggaagtgtttaggctgagaaatcaagtcctaagaagctttaggacttcaacaatggaggttggctaaagggaggaagaagaaatggtttttccttccatttctaacgttttggcctttaaattccgatctgccgacgttcccacgcgactcacttgaactcccacgcgactcacttgggatggcagacagaaataccatttctaagccacttcccacgcgactcgcgtcgttttaccatgcgactcgcgccattcattcgggccttccacgcgacccgcgtggatcccaagtgactcgcgtggagccccagaggagaccatgatttctagaccacttgccacgcgactcgcgtggatcttcaagttaatcgcgtggcacggcagagccatctgccctatattacacatatggcgcgggtcgcgccgcaccccaagtgggtcgcgccatatgccagaacaaccataaacttgcatttttaagcatctttcagaggattctaaagcatgatcatattccttaacccaaaaacttagattcatgcttaaactaagcttaaacatatgcttacgaattcaagctattacatttggcgccattagcgccaatcctggcgccaccggcgccgcacccttagcaactgctgtcttcagtgtttcactctacaatgacttaggaagcttaaagctactaagcatacttttcaccatgtccattaaggttcagttccttctttctgtcacaccattccaatctggagaaccaaacatagtttactgggcaacaatcccatgttcttgaagaaacttcacaaatagaccaagtgtttgcccattctccatgtatataccatagtattcaccacctctatgagatctcacaatattaatttgctttcaacattgtttcttcacttcggccttaaaaactttaaaggcatctaaagcttcatctttagaacgaagtaagtagagatacatatatcgtgaaaaattgtctatgaaggtgataaagtatttcagactacttgcgtccatgtttggacaataaatatctgtatatatgatttctaatagatttgtgctcctctttgcacccttcttagacttgttagttttcctatccttaatgaaatctatacaagtatcaaaatcaacaaaatccaaagcactaagtaccccttcatttaccaatcttttaattctctcgatagagatgtgtcctaatctttggtgccacaacatggaggaatcatcattcataacacatcgtttcgtgccaacattaacatgcatagcatcataagtggtatcatttttcaaattaatatagaaaataccattttacaaatcaatccacctatgtgtgttatgattaatattaatcatattagattcataaccaactaaagaggtaggaatacctttcttttcagtcatcataagagaactttctccttgttccaactgcaacctcccctcttcctgaacacacatggtcatgagttcattaatagaccatttgtctttaagtgtattgtaggatattttagagggaccatatggtgttgggagagtattcagaataaaatgcaccaaaaaggagtaagacatgtccacctctagagttttaagttgagttacaatgtccctcatctgcatgatgtaattacgcacacccctcagagtattgagcttcatggaagaaaatttcattattaaggtactggctaatgccttccttgaagtctcaaattgttgatcaatgtacttcaagagcactctcacaactgagctcccaataccaactgatattttagtcttaatgaacatcacatagagtcgattgaatctttcccatttctcatacagatccatctcctctagttcattgttctatataattgctggtggctcaactttcctgatagcataatcaatgtccatatacctcaatgtcagcagaatcatttccttccatatagaaaaatattctcctctcaatttcgggacatcaattgtattaataggttgtatagttgcaaaatatttcaacatatatgcttatcattataatttgagacaaaaataatgtattatgctttactaatgtaagtcatacttacaaaattatgaatttagcaatataaaatttgcttgtgggctaaattttaattcaattaaattcacataaacattatgataaaactatcaagttatatttcttgatccctgtgggcaaatcaaaaaatataatttaatattttatcctaattaatcatacaaaattataatagaaattcatgtgggataatatctactatattatatatgactaattacaattaatatcgtctaccttatgtgatctaaagactcttaatatataacataaataattaaagttgttgtggctaagaattaaattacatagataactaacattatctttatattattgcatcaagctccaagcaataatgtcaagtaattaaatatcacaaaataataacttggaaagtgtaacaattaattacaaaattatgtctaattctttatatgatctttaaacaaattaatatataattttaatcaaattatagatgtttgactaatccataattaatcaaaactataaagatcatttagacataaaacttaattatatgacaataaatcatattatgcacttcaagatcaagatataatacaatgatgaataaaagtctcatatacaattgcaaaattgaaatataatattatgcatttgatttaatatatatatatatataaataatatatatatatatatatatatatatgcatagaataagtttttccagaatatattcatgcataaaaaaaatcaaaactccataaatatcaaaagtaaacagaaacacataaacatataagatatagaaaaatgagtaaacatcaaataatcttaaatagcccaatggctcatttaagtttcactaaatggttaggcaagggttcaagatcattttcaatactgaacttcatattttaagaaactcaatttttatattattccaggtctctttaacaattaaacgttcaaaatagaatactcatatttcaatatgcttatatatgtaacgacccacctggtcgctactgtagcatctactcttaccacaatggatttaacttttaatgaaaacttcattaaattaattatgaaaatgatagtaagttttttgtgataatacaattattatagacacgatacaattacataattgaatacacatgtatgcatatattgaaccagtacatatcatttacatatcaacacttaatttgattttacatatatttacatctggaatcttagaagaccaacaaaagagaatcgaagaactaactaagaaagaatctccctccaaggtcacctactgctgcttatctgctctcatgaatgaaagttcacgatcatcataggtaccaaccacacgatgcaataaatgcaagggtgagtttattatataaaaccaacaaacatcagatagcaggaattgggaagaaaacaacattaacaaccactatcattacaaaaatccatgattccaatacacactcaacaaaccaatcatccaatgcatttcaaaactcaaaaatcatgcatagaatgatgcatgcacctgactcatctatcagcatgcaatgtggtaccattctcatggaaatagcctctctcgggaaaatgatgtagtagctcgtcgaggtcaccttgtcgtgcaatggttgctcccccccatggtgatcaaccctgagtcacaagggagttccaaacagagtgatgccccctagtacccccgtacttactgccaccattctatttccatccatgaaatatgaagtatgaacatgggcaccatcaatgcaatgaccatggatagatagggaccggaattttaacaatccctttctctcttgagatgcttaaaattcgtaaacccaccctcgcaaggttatccagtcatgcacccccccatgtacatacacaacatcaccgatacactgaccatggatagatagggaccgaaattttgaacaatccaattctctcttaggatgcttaaaatttgtaaacccaccctcgcaaggttatccggtcggtcaatgtaccccacatggacatacacaatatacaaccataggcaccatcaatgtatgacctggctaggaacaaatccttcctcgcaagggtaacccgtcatacacccccctcgggtatccatgtatatttacacacaatgacattgttcacatcaacattatctctcatcaatgtcattatcaacatcaacatcacatcatctcaatatcatcattatggatatcaatatcatgtcatttgaacatcatcaactacatcaagaccatctcatctaaacatcatcaattatatcaatcacatctcaatttcaatatcatcaacgatatcacaagcaatcacatttcacatatatacataatacatatgcttgagattcacattccccaggtcttcagacaacccaaagttcatacattcacaattcatcatatcagaagactgatatttttaggaaaattctaaattaaagaggagggctacaatatataaaacacactgttatgcccataacaaaatttaataaagaattaaatagaagaacacattataaaattttggacagagtctcctctgtaattaagacttttctcaaaattccaatcattacagcgacaatatcatttacagttatatcaatcaacaagtcaattcatcgcatcccattagttaaaaacacaatttttcttgacaacgagcacacataggaacaaacgcacatcaatcataatacatcgcatcccattagttaaaaacgtagtttttctttaaaaccagcacacaacagggattggcagttatcttcatagttggaatccctggcccccaactatggtatcaaaactgtaaccaggtaataaactccccttacctatctatatccctctgttagctccttgatacgtcattttgggatctctcaagttcacgtgctttggcccaaacgtagagctctatatgccaaattgaagataatttagtatagatttcaaggtaagatcaatttaacatttggggtcaagtacccactcaaattcaaaaaggggctaaaggggtgttttaggagtccacatcaaaagacaacattttgaaattctgatcacaccaatgtgaccagggttcaacaaggatcacagaaatgacatcaatttcataaaaaggagacttttacaacatctcatttttaaaggggtttttcaaaggaagtgtaaaactcccaataacaatatccaaaacgcaagagaccctaatagaagcttaaactagctaggagaagataaaggaaaccaagaaaggaggattgggagctccgttcttgaccgaaactttgagaaaagtttcgacgattccgctccgattaaaaggttcttcaccgcgccggggtctcatggcaagcaacgacgttccgtggttgtctctggtggctataggtggtagtggaaggtggagagaggttagggaaggcttgtgggaggaaaaatcctccatttttgtgacttggaagcttaaaaacgtattcagcaccacctccactcacccaggcgagcaaaagttggctgtaaaacttgcctgggcaagctgcccaaattctagaattttctgcttcagggaaaaattattttctcacgttacagacattatattcataatcccaacggtcaaaagctagacatatgggttaggaatctttttctacaattttaaggagatccaacggttaaccaatttgtaatgatgattttactaaaatatgattttgggtcaaagtcagaatcactcaattacaacgcagttcaaacaaactccacataacttgacatctacaccaagcaattgcacatgaataattcacataacatttcaactaatctaaactaatcaaataatcaaataacataagaaatacattaaacatctattttcagttatcaaaatttcagggtgttacaatatacatccgaagctattagatgaaatgcgaaaaaattaagatcataaatatctcctgccattgctattcttatttgttctgaagatgggttgaagttttctctgagctaaatggcccgagagtcagataatttgaacaatttgagtctccaaactaatatgacttttggcttaaggatcttctatgctctaactatcactcactgatggtgtattgtgatttttcagatatcaagcatagggaccttggccatggtgcgcatctccttttataacctcttcccatcaaagatgttgttttttgatctgcataaaacataggcatagtagttgaaaataagggatacaatcaataacaacttattcctaagaagagggggtgagtagaccaccttatgtggttttgatttagtcaagcagcagaaaagataacaacatctttttgttattagtttttctcgtaagtaccttcactggctccatttttttatcccacatcccatttttttctcctaaatcttttctgggcaatgatcccattccataacgtttgtcattatcattaattccttgattggactatattgtatctatttcaaaagcctttgtcacactaatgtcaaccctttacttcaacttctccaccatgtttgttggatatagggggagcatcaagaagattgaagcttaggacttggaagaatgttttgagcttttcacatgccttgaagattgtaacttaaaaggaagtgtaaagaggccaatttgttgatccttgcattgcatgcatttaatcatttaaatgcttaaatattttcatcaaagtataaaagaaatcttttaaaaagaactaattaggaaatgttttggaaaaatgcatatcttactgttttaatcgattacactatggtttaatcgattatttgctttatttttaaatctggaaaagctttgaagaacaattcaatcgattaccatttctagtaatcgattacatagtgttaaaagcaaatcgtgctttgccgacttaatcgattaccatttcttgtaattgattacatagtctatttcggaaatcatgtcgttctgtgtaaatcaattaacatgagtcgtaatcgattacataagtgttttaaactttcatgggttgctgctttaattgattaccatacagattaattgattattttgttcatgaaacatttccagaaagctgatgaacagtttaatcgattatttggttaaatgaatcgattacatagggcaatttaatcgattacacctacggattaatcgattacagacagttaattctgttttatataaagcttggtgagtcttttccttataaatagacatattacgacttactcaatacaagagagatttacccataagtttccaagctttcataagtgcccaaaatttctgtgtttctctaagttcaaacaatatcttgtgtgatcaagatttctgagtttcttagagaaaatgttttagagaaagaaggatttcaagattgtgattctgagctattaatctttgcaacctgaaagtgtggtaacaacatttcatttcattcattcattcatgaagcatctcaggttgtgtttatcttgaacctttctttttgatgttctaacaatttctattgttttgtgatatatcattgtgaaccttttcaagcatgctagagtagggttctctaattgttgagattctgagtagggttctcagtatcttggtgatttgtattctaatagggttttagaatctatatctttgtctagtgttgataaagaaatcacttataaactgcttgtaaaagattctttgatatagtaataactctaacctagtgtgagttggaagcaactggatgtagcctccaaggttgagaggtgaactagtataaattggtgtgttctttattctaattttgttcttctctcattgtttgaatttggttgattaagaaattatcaacaagatttatttttaggcattgtttgaattccaagggtgatattggtttaaagaaagattctgtacttacaaagttttaagtgatacaatccatattttaaattccgcaaattgttttgaataaaattttaaaatcttgatataaaccaattcaccccctctcttggtttgtttcattagcgttcattctattttcaattggtatcaagagctggttctttaaagttattcaagatcactttcttttcaaagaaaatgaacacaaatcaaataacttttagagagggagcttctctcaatcatccatcgatgtttgagggtgagcattttagtttttggaaaaacagaatgcaaatctaaaaataataggaatacttcacaacaaccaagaggggatgggggtgaattggttgaaccttggtattttaaaaaataaattcaaatcggagttttaggatctttatcactttcaaaaccaagcaaccttttatttaatcaaatagctcagctccaagaaaacaatttcacaaaaacagaacttgttgaacaatgaatatgactaaaataattatagatcaatgaataagatgagaatagagatatagaaataagaacacaatcaatttatactggttcacttcaaaacatgaagctacatccagtttcttctaattcacactaaattagagttccactattataaaatattcttacaagcttttacaagaacctcccctttatcaactctagataaagaacagatatctaaaaccctattagacttctaaggagaaagattcagagaacactactctgatctttaagctagagaacccttctctagtcccaagcaagaagaacccaattacaatagtcaaatcacaaagaaaatacaaaacagaattataaccagattaaggtgagaaaacaacctgatgatccaatgaaataatgcaaaaagatgttactagatcaggttgaatgattacacataaaaaagcaaagctttccttaatcttgaaaaagtttcaagctccaatattgaatcacacactcatgatcaatgcacaaaggagcaagaagcaattgaacaattagaaaacacttaagaatgctcacaagattgtttaggctcataaaattcgtatgggtaatgtttcacaaagttagaaaagtagttgagcattagttctatttataacaaacttttgtaactgtcagtaatcgattaaacgctccatataatcgattattttactcatgtaatcaattaaatcaagataataatcgattaaaccgttcataagcaattcaggaatttctcaatgagccaaataatcgattatttcgtcctgtaatcgattaagacaggaagcttcaaaatatcaaaatgtactatgtaatcgattacgaactctagtaattgattaagacaggagcttgtagcattccaaatacactaagtaatcgattacgaaatgtggtaatcggttatttaatacaaacttaaggtttttgttagcaatttaatacgtccgcaccacggcaagtgcaccgatcattttcaagtaataaaacaggtaagtgagtatcgttctccacagggattggggtgatgttcacagtaatgaggaattaatgtgattgaaagtaaagaaaacagaaaatgttgaaaagaattgttgtggattgaattggttgtttgagtgtaaaaacagaatttaaagaaaactgtaaatcaaattgagaagttaccaatggacaaataattgtggtcagacgcaatcccctctgattcctacctccttcacttgactggtttattaattttaatgtacacaaatgataaatctctcctaaattcataaatcctaaattattagcgacttaaccctttaatttgatcgagaattctaaacccttagcaattctgtcaaactaagcatttagagaatatgtcataagtgtttcttgttataattgttcagagaataagtcttttctagattagttaatccctaatcccttagtgaattaaccctttaacctgaatcgaaaacctaattccttagtgaagtctatcagtttaagcatttaaaagatcatatcataattttgcagccacgcatccttatccctaggtgatgaacaactgttattctaaacaggtcagaaattagaatcctaacgtccccattgcaaatcctaactctagctacttaatcagagtgatcaattccaaataagaatagagaataagtgcagaatagaataaaacaatcaaaacattattattcaataccagtcaaatcccagaggagttcacatcagttcatggccttcccacaatacaagatttaacctgccataggcctcaagaacatcaaagttgtagaataatacatgattgtgctgaaaccctagccttgattcttgattctcagaagtttagaagaatggaatatggtttttagatgaataatggatgatttcttcagcccccagaggccttatatttataggatgatttaattacagcaactgagcctaaatctgtaccaaatttcgaaacatataaatctaaaacaggcaacaaaatcttcatggcgcgatcccgcgctaaccgcgcgaacctttcgaatcaatggtgatgatcgcgtgatactccatgctaaccgcgtggagtcttcgagctgaatgggttgatactggaattcttggcgctaacggcgtggctttggcgcgatccgcgtggtggcttcgaatgcctagcgctgatcgcgtggtaatggtgcgaatggcgtgagttgttcgagctaacaggttggccttccttgatctggcgctactggcgcggagtccgacgcgactagcgcgacttgttcaagtctgaggtctgttaatttacaagtggcgcgacccgtgcggctctggcgcgatccgtgcggtaccttgaactcagttttcttcttttcttggccttgattctcctcttttaagcctgaaactgttcaaatggtaatgaatttaattaaaaacaaataaattgataaactaactattcctattctattttcctaattatttaactaaattataacctaaaactaacctaaaactaagatgtgtttgcaacacatcagttttcaaacacatagtgtaatcgattaaagcaggaaaatggcttttccaattaagcctgtgtaatcgattacaataccttggtaatcgattcttccagcatgacttaaaatcaacaaggcaatttatataaaacaaaggtcaaataatcgattattccgataggtaatcgattacattgttcttgaaagcttttccagaatagtctaagaacaaaataatcgattatacctttaaggtaatcgattaaattagtacaaaaaccatttttccaaaaacctttgattcaaatcaaaaacttagtcattttactaaagccttgtgatttttattaatcaagttagttgtattattgaatgatatgaatgcaatgcacttggatcaccagaattgcttttctcttacacatttcacactaattaatcttcaaggcatccattgcatgttgaaagctcaaaaccaatgcttgattcgtttcattctttaagtagctccccctgaacccaacaaaatctttattcaatccaatgaccctggagcttagaatgccattgagaaaggtcctttagttcctatgaaaatagttgataacaaattgatccctaaagaatgggatgagatgtcagatgcagaaaaagagttgtccaatacgattttaaagctaaaaacatgataacatctgctttgtcttctggtgaattttttagaactgtgggatgcaggagttcaaaagaaatgtgggagatgttggaggtaactcatgaaggaactgaggaagtaaggagatcaaggaaacatgccttgattcatgaatatgagatgttcaagatgagcaatactgaaaacatttctcagctgcaaacaagattctcacatattgtcaatcatcctctaggacttggaaagacatttgattcagaagaattaaatatcaaaatattgaaatgtataacaagaccttggcaaccaaaagtcacaactatcaaggaatccaaagatttatcaaaaatgtcaatggctgcactatttggtaagctacttgaatgtgaacttgaaatgtctcaactaaccattactgaagatgcaaaaaagaaacaaaaaagcattgttttgaaggctgcatcatctaaggttgaaaaagaagaagattcaagtgaagaagatgaaaacatgaatcttattgcaaaaagtccagtaaattcatgagaaggaacaagaacaagaagttcaaaaagttcaataaaaagagttacaagaacaacaacaacacctctaccaactttacttgctttgagtgtggaaagcctggacatatcaaatctgaatatccaatatttttaatgaagcagcaagtagaaaggaaaataaaaagggaaggaaagacaaagaaggcatacattgcgtgggaagaaaatgaatcaactacttctagatcagctagtgaagatgaggaggaagctaatatttgtctcacatctataacaagtgatgatgaaaactactcaggtgctgaatctgaggtaaattctgagtatgataatatagttgatgcctttaatgaaatgcatagtgaagctcaaaagtcagctaaagctaataacaagctaaaaggagatttaaggtggcacatcaccaaaattgtagaattgcaaaatgaatcttgtaaattgaaagaagaaaatgaaaaacttctttcaagttacaaagtcaatgggtgcacatgtacatcttcttcttctaagcttgataaatacaatatgttacaaaaggagtttgatgaatacaaaagaattcaaggagaaaaatatatgttgctactttctaaaaacagtgatttgatttatcttttgagaaatgataagtgtgcagaaatatgctggagatacttctggcttgggatacataagggttcaaagtcctttggcaaaaccaattttgtaccaccaagacagaagaatcaaagaaacttcagcaattcaaaaatcaatcataacaccttctttagaaattcatcaaaacctataatttgtaactatcgtatgatgaaaggacatacatctttcaaatgctatgctagaaagtattatgtgcctaatggagagtgaatgtgggtgtaaaagaagaaaaaggtagctaacccctatggacccaaccttaatttggtacctttctttgctacttgatttgaattcttcaggtgtgtctaagagcaagatcatcattgtggtatcttgatagtagatgctctaggcacatgactggtgacatccatgctaactgatgtcatattaaaagatggaggttatgtcacttatggagataataacaaaggcaagattattggagaaggaaacattggagatagctttaagacaataatcagaaatgtcttgtatgttgatggcttgaaacataatctcctaagcataagccaactatgtgacaaagggtttaaagtttccttcaacaacaattgctgcttgatatatgacaatcaaagtgatgaagttatccatattggcaaaaggaagggtaacatttatgttctatccattgatcatgcattcttacatcatactggctgtcaaataaataaaattgatgatacttggttatggcatagaagagctagtcatataaacatgcatcatttgaacaagcttattagaaaggacttagtagtaggattgcctaagcttaagtttgaaaaggataagataagtgaagcatgtcaaagaggcaaacaaattaaaaattcttttcaaagtaagaatgttatttcaacatctagacctcttgagttgcttcacatggatttgtttggtccttctagaaccatgagcttgagaggaaatttctatgggcttgttattgtagatgattactcaagatatacatggactttatttttaagatcctagagtgatgttttctcaacttttagaaaattggccaagtttattcaaaatgaaaaagaaagtaatatagtttcaattagaagtgatcatggaggagaattccaaaatgaatattttgaaaacttttgcaaagagttttgaattaaccacaaattttcagctccaagaacaccttaaccaaatgttgttgtggagagggaaaataggtcacttgaggaaattgtaagaacacttctaagtgaaactaaattacctaaacactattgggcatatgctgtaagtacagtttgttatacattgaataggattatcataacgcctatcttgaagaaaaccccttatgaactatacaaaggtaggaaaccaaacatatctcatttgagagcatttggctgcaagtgttttgtattaaatggaaaagagtccctcggcaaatttgattctaaagctgatgaagaaatttttcttggttattccttacaaattaaagcctgtaggatctttaataaaagaacattgtgtgttgaggaatctgttcatgttgtatgtgatgagactaacccttccaaagagaatttggagtgtgatgatgatcaggacaaaaggaagaatttttgcaacttaatgatctgaataataaagaaaaggctaaaccaaatgatgaactggaacattctacacctttacaaaagcacaaagaatggaagacaactagagatctctctcttgacaacataatagggaaagtatcaaagggagtttctactagatcctctttaagaaatctttgttgtaccatggcttttgtctcacagattgaacctaagaatattgatcaagctttgctagatgaacattggttaatggctatgtatgatgagttaaatcaatttaaaagaaattaagtttgggaactagttcctagaccatctacttatgtacctattggcactaaatgggtttttagaaacaagctggatgaaagtggcattataataagaaacaaagctagattggttgctaaaagatgcaaccaagacgaaggcattgattatgatgagacttatgctccagtaacaagattaaaagccattagattgtttcttgcatatgcatgtttgatgaattttaaactgtttcaaatggatgttaaaagtgcatttttaaatggttacattgaagaagaaatatatgttgaccagccccctggatttgttgatcacaaacatcctaaccatgttttcaagctaagaaaagctttgtatggtttgaaacaagcaccaagatcttggtatgaaaggttaagtaaatttctgcttaaacaatctttcattaaaggtcaagttgataaaaccttgtttatcaagaaaagaggaaatgatttattgctggttcaaatctatgtagatgacattatttttggttctactaatcaatctatgtgcaaagaatttttagtatcaatgaagagtgaatttgagatgtcaatgattgtaacgacctaaaattattctagatattatatttttattagagttaaattattaagaaatcattagataataataatttttactaaacggatattagtataaattctaaaatgtaaagattatagaagttgttaaattgttatgtattacaatcagtcatagttcttgttacaaaagtcattatttaacaagtacaaaattttccatgcataggcctactttatatcttcatttctacaccatcaccaatccagggcatcaaggagattaaccactattgccatctaaaaaaatgaaacaaatctaatgagaaataaaatttctcagtaggcaaattctaaaccaccaaacacgttagtacgttggtaaattctcaatataaccaaataaattcacacaagaattatgcagctatatgaatgcatgaaataaagttctaccagggtggacatggcctctacatatcgtactgggtgcacttggtcactacatatcgtactgtatgtagtatcagattctgtttctcaaaatctcgtactggaattggaaacatgaatcaacatatcatgacatcaaatccatcaataacaaaatccatgggcaaaatacacacaaccttatggaaaaatttatatcatacgtatccaaaagcatggtttaaacaatcataccttattcaagtaaaaatcataccaacttaggtatgataattgattatccttaggctacagaaaaatcatgttagtaatctaactaataaaccacaatatatccttcaaataatttctaattcctttaaaccttcacaagaaaagattaaaacctagcatgcatcttaatctcctttcacctaccaccttactacttcatcctcaaatttaatcacccaagcatttgaaccatttaactacataccattcaacatctacttctcaaaattaattaaaaacattcccataatgaaaatatgaatatacagcccaaaggtcatcaaatcgcttccaaaatcatcaagtgtgattccaaatatcaccaatatttcaacatataaatcatcacctatcctatggtctaaatcaacattttcacatcataaaataaccttcaaataacatgaaatttcaacctaaacaataaccataaatctgcctaattaagcaaataggttaaaccaaacaaatgcttaactagagattgaagcctagcctacctcaagtgagtttgatttttgaaaatggaatagagtaaggctaccttctacacgtgatcttcaagggaaagtggagcctctttatgctttggaaaggaaaggatgaaaatgaaatggaagagatgggagaggaagttcatgtgtggcttcttgtagaaaggggtggtcttgaaatgacttgcacttaagttcccccccccccctttcctttatatagtagttggaaaataattgaatatttacaaaaatctctaagtcatgatgcttccatcataagtgtccctacacttgtcatgacctttacaagtgtcccaccacttgtcatggtcttgaagcttcttcctttctttcttccaagtgtccctcctcttggcaaatcatgaagcttctccatgctttttgcttcttcacgtgaatactagaggaagggagaaaaatcttgcttcttttcatgttactttatgtacatatgtcatttttgatgatgaagaaaaatctaattcccttatggctttgcacatggcattttctagtaggaattcaagtttgattcaaactcttctacctaaagataatattgaataatagcattctaaagtttttcagaaactgacttcaatttcagtaaaaattgctcacaagcaatatatacagagtactactcaaacttttcttacaagactattcttatcttaattctgattggtccatactacttttaacaatcaaaattactaaaccattttattaaataagtctattcatcttacaattaagagaaaattccccagattctacttatcatttttctatacttttctgctacctaagttttcctgaatagaattttaaagttatcactgtataaaattcatagaaattatattctgaagctttctgtcacaaagtgtttcggtaatttgccatcaaaggatactctgtaatttcatcaggttttcacaaagtatctaagggtgtcttggtaaattttagcttcaaggattttatggtaatttgcactctaaaggcatgattgtaattttctaaaatatccaagggtatttttgtaatttctaccttaaaatatctaaccaaaatatccaagggtatttatgtaattttcacctcaagggcatttttataatttctattttaagggaaggacaatatggtcatttctcctcaactattgtttttttatccaagtatcattacacttccacaattcaattataaatatgaattcaagatataattttgaggatgttacgatgatgggggaactcatattctttctaggattgcaagttaaacaaatgaagaatggtactttccttagtcaatccaagtactgtcaagagatgatcaagaagtttgaaatggtgaattgcaaggaagcttcaacacctatggcaacttctacctatcttgacatagatgacacgggaaaatgtgttgatgagtctaaatatagaggaataattggatctttgctatatttaactgcaagtagacctgacattatgttaagtgtttgtttgtgtgctagatatcaagcaaatccaaaaaaatcccatctaacagctgtcaaaagaatcctcaagtatctcaaatctataccaagagtacgactttggtatccaaaaggtacacctatcagcttgatttgtgatattgctttgtcgagacgcatcaaaaacaattttactaagctaattctgtagcacagagctaacctaggtcgactcagagacacgatcaatatagttctagcttcaattcattggtaataataaggggagattttgtcaaacagttggtatgcgtaaagtaaaacatgcaagaacacaaactaaaattaaagaacaatgcaaaaattaacaagattattgatagagtgcttttagttgagtatttttctatccttcttagcttatttgacctctcttggacctatattttcctattctaattcagtttttggcctaggcaagtaagtgggcttaattgctaattgttgcgtattttcggatttttggctcacttgacatatctgacttgtgcaggatctataggatgctaccaatctccaaattcagcgttctaggagtccctggaaagataacgaaaagatatataagtttgctagaaatagcccgaggccaattctgtcatttataggatcattttaagctttgaagttagcatctctgcacttgtaattttgggctgcgaagttgcatttcttggttgtaaatagcaaataattagattgttgggcttgtttgggaccattttattttcagaactcagtcactacatatattagtgactttagtgaaacttgggaaccactctttacatttcaataaacaagttttatttttcattccttaagtttttagaatcaaacccttgttcttcattttctctctactgttcttgcttgttcttcattgttcttcatttttgtttttctgttcttccattttcgtgcaaccatttcatggggctttcactaatgatgatcatagaagggtaaatcctcaatcaatccaagaatccaacccaagcacaaggagaatttgagttctggtttagtatttcgaatcctatgtgaatgttcatcttcttcttcaattgctattatgttttcatgattatgaatgcgtttaggattgaaaacggattaggttatggattcatttcctaatttcgaacattaatcacataattaattgggtgatatttcagttagggttgtggtttcaatcaatttaggggttaagtcgattgagttgcttctaatgagattgaatgaattttcatgataggattaatttctaagaacaatgatgattcgaattgcttggtgaggtgaattggattgatgttttaaattctgttttacattactttttttgaattttgttaatttctgcagcattgttctttaattttagtttacgtttttgcaagttttacttacgcatacaaactgtttgataaaattccccctcactgttattcataaattgaagctagaaccatattgattgtgtctctgagtcgacctaggttatctctgtgctacagaattagcttagttaaattgttttggtgcgtgtcgacaacgtgttatcaaaactggcaccgttgccggggacacggttcattatgtgctagctttaatttgctgtaaatagttcatagtagtagttatatatatatatatatatatatatatataatatttgcatacatttactgcatattgacattctgttgcacaattgcactttgtaacatatttgcattgttgttgttgtgcattatgaagtagagtaaacagagcaaaagcagagaaaaaaacagagtagtagtagggagagagttagtgtagtgtagttgtttttgtagtgtcatttgttgtcccaaaattttttcccacttgtgcagtttgagtttcgatttgttccccaaggtttatcccccattttaaacaaaagcaaccccttcaaagggttgggtgtgggttcaaattggcaaattcgaactctaagtaggagttttgtaccagtttttacaattggcgcaggggcattctggtaatttcacagcaaactatcttagaattgactgaaattttaccagaaggtgcagaaaattcatacatcaagttgaacctgttatggagtaacacgtttaccaggggtccaaatcgccaaattccatcgtttagaccatttttttaggcaattttctaatttcatgatttttaaaaatcaccaaaaaaatcaaaaaaatcaatcatgatttttagacattcactgttattttttttagattttttcaaaactttttagggctgttttctaatttctatttcatttcagcatatatagttgatagtgtcctagtagcagctgtttgatatttctgtgctgtctgtgtttattgttctttatgagctgaattgtgtatgactaggtccatgataactacgttgacgacacgcaccaaaacaattttactaagcttattctgtagcacagagctaacctaggtcgactcagagacacgatcaatatggttctagcttcaaatcattggtaataataaggggggatttttgtcaaacagttggtatgcgtaaagtaaagcatgcaagaacacaaactaaaattaaagaacaatgcaaagattaacaagattatcaaggaataaagtaaaataggtgagaaaacatcaatccaattcactaacccaagctatttgaatcatcatcattcccataaattgattctaccatgaacattcattcaatctcaataaaagtagttcaatcgatcctactcctaaattgattgaaacaaaccacaaccctaactgaactatcattcaattaatcttgtgattatcaattgaaattaggacatgaatccataatcctaactcactttcaaccctaagtgcattcataatcatgaaaacataatagaaattgaagaagaaggtgaatattcaagtagaaaccgaaatactgaaccagaactccaattcttctcttgcttgagttagatccctgaattgattagtgatttagccttccatgatgatcaccaaggaaagccccatggaatgagtgcagaaaaatggaagaataacaaaatgaaaatgaagaagatgaagagcaatgaagaacacttgagagaaaatgaagaacaagcttttgatcctaaaaactaaagaaaagaaatgtaaaagttgtttattgaattataagtgtgctatccaagtttcactaagtcactaatacatatagtgactaagttctgaaaataaaatgggcaacaaacaaacccaacaatctaattatttgctatttacaaccatgaaagtcaaattcgcagcccaaaattacaagtgcagggacgttaacttcaaagctaaaaatgaccctctaaatgacagaattggcctcgggctatttgtagcaaacttgtagatcttttcattatctttacagggactcctagaacgctccatttggagatcagtaactccctataggtcctgtgcaagtcagatacatcaagtgagccaaaaatccgaaaatacgcaacaattagcaattaagcccacttacttacctaggccaaaaactgaattagaataggaaaataaaggtccaagagaggtcaaataagctaagaaggatagaaaaatactcaactaaaaaccctctatcaaaatcccccacacttaaacttttgcactcctgggcgaaactaaaagaaagactaagagaaaaaattcaaactaaagtaaaccaaaaatttaaagaaagggtatgaacaaggcacacatatttttcaatggatcacaacaatgctcaaaagtgagagatggaaagatggaagaataatattgaggtgacaaacaacccatgaaaacatgatcacaagtgcaaagtgaaaaagtagtcaagtttagaatcaagaatgcaccaaggtgatagaattctctcaaagggtggcactctacctcacatgatgtatatagcttgtatttacactcaaacaccacatgcaactagcacatccaagcattgacaaacctctcattcattcaacttgaaatacacatgcatcaaaagatcaaaagactttattagcttgtaatgaatggcttagggaagggtggataagaaaaggatatttaggctaaagcttaagagaaaagagggacaatggggagcaagccaacaagataaaagaagggtagaagcaaggtgaaatttgaaagaatttacaaggatgaaaataaagtataacaacttttattgcatattttttttctttgcttgaacttctttttctttgtttatacacaatttttttttatttcttctttttcttcttttctttgaattttttgctatttgaactctttcttttctctttttcttttcttttctttcaaaacaaaacaaaagacaaacaccccacacttgtttgaaacccactcccaaaacaattccaaagcccattttctccctaaagctagggtaacatggttttccatcattttttagtttttaatgagctaaacaagaaagaaaaggctaaaggctcaaagagggtgacaatggatatcaacacaaggataggtttatttggctagtggctaaaagaaggaaggcctaaatcatctcaatcaaagcatgtgcaacaaggaatgtcaaaagaggcaaggcaaaacatagagtaatctagcacaagggtgaaatcacacatgaaagaacatattcacaaaggctcaaaaactcacaagggatagttctaccacacatggttcatcttaaattctatttctcaagcctacttatcacttcaacaattgcaacaatgattcacatcatgtatgaaacctctcaatccaaccaactttttaacatttctcacaatttatgcaaattagaaatcctatgaaaaacatgaaaaagtgcctaaattcaataaaaacagtaacaaaacagaaacaacagaaacagacaacaaaaacatactgactcgaaaactaaaatagacaaacagaataccgacagacagacaaacagaaaacagaaaacaacaaaagaaacagattttagaaatcctccaccccccacttgaaatgcacattgtcctcaatgtgagcatgcaaagaaatgcaaacaaagagacaacaaataaaaggagggaaaaggaaactcccaaagtgtcgttcaaggcacatcccaaacataattttcttgatgcatgcagatgggaggatcaatttcaagaagatcagcaagtgtccatccaggggcctttttgtggcctctcaaaacatgcatcaaattctcttcaagctccattgacagactattagatatgatgattggaagcttctgagcatcatctaaatatgcatacttgaggtgctcaggtggtgactttagctccaaggaaggtgactcaatagtggaaggtaagggaagagtagaggttgagagaagtgggatagtattctcagaacctgtatttgtacctacaacacaataagggtaaagtgcagaggaaatctccacacaaatactgcacacaacagtagagtcatcacaggcacaattataagaaccaagatcaaagttagaaaattcagaagaaaaatcagaaagtaaatcaggaatatctacactatctactgcagcatcaatgatattaacaagaaaaatagaatattcctctataggatctgatttagcaccaacaactgtggaatctggaagttccttaccactccccaaggtaatggcattcacattctctggattaatcactggttgtgcaggaatgttgctagaaccttgctgctgcatctggttgactgatggggtttacgaatacggcaagtgtaccgatcgttctcaagtaataaagtaggtaagtaaattatcgttctccacagggattgagagtaatttcacagtaaactaactattatgattaaaattgaaatagaaaatgcgaaaatagaattgttgttggttttgttggattacgtaactaaaacaagaaagtaagtaacacaagcagtaaattgattataggaattaccaatggaatatgaattgtggtcaggcgcaatccactatgattactactccctcgcttgattgattaactaacattaatgcttgcaaatgataaatctctcctatggttgtaaatcctagataactagcgatttcactctttaattcgatcgagaaccctaaacccttagcgattctgtcaaattaagctttaagagaacaaatcataagaggttcatgtgttaattgctcagcaataagcctttcctaaattagctaatccctaattccttagtgaattagccctttaatctgagttaaaaacctaattccttagtgaattctatcagattaagcatgcaaaaaatcatattatagcactgcagctccgcatccctattcctaggtgatgaacaactgttaccctagttcagttcagaaattagaaccccaacgtccccattgcgaattctaactctatgttcttaattgaattgatcaagttcaagtaagagtaaaaggaaatacagaacagagtaaagctattaacacatataattcattactaatcaagttcaaagagtaactttcatagtctcatagcctttccacaatatagagcttagccaaccatgggctgcaaatacatcagagcaataagataaaccattgttgtgcagacttcagccttgatgcttgcttcctcaaattggatggaaatgatagctagtctagggtagaagaaagagacctaagcctatattcctaaaccctaaccctaactctgacctctgaaccctctctccatcctctctgtactttttctgacgccaactatttatagacaagccacattcaatctcaggtgctatccacgtgcttaattttttttgtcagaaaatcctctcgcgtgatccgcgctcgattccgcgcggttagcgcgacttgatcgaaagtggggcgctagtagcgcgacatccatgctacccgcgtgagccattcgaactgaatcacttgggtctggctttaatcggcgctgataacgtggaatcccgcgctggtagcgtgggttgttcgaagcaattaatgctgcaggggttctggcgctggtggcgcggattctcacgctgttagcgtgaattcttcgagagccttgctgaattcttgcacatggggctgtccgcgcagcatcccacactatccgcgcgggactcaaaacaagcttttttttcttcttttggtcctaagcttcctttttgtacctgaaaaggctcaattagtaatgaattgaattgaaaacaacaaactaacaaactaggctaattctaaactaatttcctaaatatttaactagaatttaacctaaaactattctaaatctaagatgtgtttgcaacacatcattgacagttatagctaactgtccaatctgagtctggaggtcttggatgttagcattgacattctgttgaaactgaaggttggtggtagccatctgcttcatcaagtcctctaaagaaggtacagaagtggcttgcacaggttgtgcaggtgtaggtgcaacttgctagaactgtggttgttgtctgaatggggaaggttggtatttggtagtggcaggctggaagtgctactgtggaggtctaaatggttgttgttgctgtggaccagggccaatggcaagttgcctcacaagggatgtcaactctgttaatttgttctccaatctctggttgtcagcaaccatagaaacagaaacttcgtctgcaacctttgatgttgtaactctagcaccaaattgttgatagttagctgccatgttagaaatcaactgccttgcagcaaaaggggtcttgtccatcagagtgcctccactagctgcatctatcatactcctatccatccacatcaatccttcataaaagtactggattagcaattactcactgatttgatggtgaggacaggtagcacacaacttgttgaatctttcccaatactcatacaaagactctccagggaattgccttatgccacaaatttcctttcggatggatgctgttctagaggcagggaagaatttttccaagaatcttctcttcatgttagtccaagtggtgataggatctggttgaaggtacaaccaatccttagcaacaccatccaaagagaaaggaaatgccttcatcttgacataatcctcatggacatcatgtgggcgcatggtggaacacaccacatgaaactctttaaggtgtttatgtggatcttcaccagcaagtccatgaaacttaggaagcaaatggatcaatctagacttcagttcataactgacctcagtctcagggtattgaatacaccaaggttggtaagcatcaggtgtagctaactccttaagagttaggttgttatcagccatgatatcaagatgtgtagaagtagaagaagtagaagtatattcacgatcaaagtcagaagacgctacactactgtctaaaactacactatcaaagtcatctaagtcatctaacctaatgttatgcctatgtacatcttacttcataacaagttcaacttgatgtatgaattttctgcatcttctggtaaaatttcagcacattctgatatagtttgccgtgaaattaccataatgcccctacaataattgtaaaaactggtccaaaactcctacttagagttcgaatttgccaatttgaatccacacacaacccctaaaggggttgcttttgtttaaaatggggggtaaaccttgggaaacaaatcgcaacttaaactgcacaagttctttcttttttttttttttggcgcccaagctattagcgtgagactggcactattagcgtgggatgttcgaatctatggcgcgattagcgtggatttcacgctattagcaccaggacttcaacatcaggccctggtttcgaatatgtggcgcgattagcgtgaattgccacgctattagcgccagctagtcgttttgctctgttttctgggtttttctttatttttatgggttttcttctatttttatgggttttttctctatttttatgggcaaatacaaagctaatgcagcaaccacaagcacataatcatgtaacaagcatagttgtgcaacaaaaacaaaaatgcaagaattaaaactacttctatgaactaattacaatgaattaaagctagcacacaatgaaccgtgtcccctgcaacgacgccagttttgataactacgttgtcgacacgcaccaaaacaattttactaagcttattctgtagcacagagctaacctaggtcgactcagagacacgatcaatatggttctagcttcaaatcattggtaataaggggggatttttgtcaaacagttggtatgcgtaaagtaaagcatgcaagaacacaaactaaaattaaagaacaatgcaaaggttaacaagattatcaaggaataaagtaaaataagtgagaaaacatcaatccaattcactaacccaagctatttgaatcatcatcattcccataaattgattctaccatgaacattcattcaatctcaataaaagtagttcaatcgatcctactcctaaattgattgaaacaaaccacaaccctaactgaactattattcaattaatcttgtgattatcaattgaaattaggacatgaatccataatcctaactcactttcaaccctaagtgcattcataatcatgaaaacataatagaaattgaagaagaaggtgaatattcaagtagaaaccgaaatactgaaccagaactccaattcttctcttgcttgagttagatccctgaattgattagtgatttagccttccatgatgatcaccaaggaaagccccatggaatgagtgcagaaaaatggaagaataacaaaatggaaatgaagaagatgaagaacaatgaagaacacttgagagaaaatgaagaacaagcttttgatcctaaaaactaaagaaaagaaatgtaaaagttgtttattgaattataagtgtgctatccaagtttcactaagtcactaatacatatagtgactaagttctgaaaataaaatgggccacaaacaaacccaacaatctaattatttgttatttacaaccatgaaagtcaaattcgcagcccaaaattacaagtgcagggatgttaacttcaaagctaaaaatgaccctctaaatgacagaattggcctcgggctatttgtagcaaacttgtagatcttttcgttatctttctagggactcctagaacgctccattcggagatcggtaactccctataggtcctgtacaagtcagatacatcaagtgagccaaaaatctgaaaatacgcaacaattagcaattaagcccacttacttacctaggccaaaaactgaattagaataggaaaataaaggtccaagagaggtcaaataagctaagaaagatagaaaaatactcaactaaaaaccctctatcagtccacatcaagtgaattacattcatttgatcttgagatagataggacatttcacagattaaacaggcataaccctaggttagatgacttagatagtttagttttagacagtagtgtagtatcttctgattttgattctgaatctgcttctactcctacttctacacaccttcatatcatggctgataacaacctaactcttaaggagttagctacaccagatgttgttgaccaaccttggtgtattcaataccctgagactgaggtcagttatgagctgaaatctggcctgatccatttgctccctaagttccatggacttgctggtgaagatccacataaacaccttaaggagtttcatgtggtgtgttccaccatgcgaccacatgatgtccatgaggattatgttaagatgaaggcattccctttctctctggatggtgttgctaaggattggttgtaccttcaaccagatcctatcaccacttggactgacatgaagagaagattcttggagaaattcttccctgcttctagaatagcatccatccggaaggaaatttgtggcataaggcaatttcctggagagtctttatataattattgggagagattcaacaaactgtgtgctacatgtcctcaccatcaaatcagtgagcaattactgattcaatatttttatgaaggattgatgttgatggataggagtatgatagatgcagctagtggaggtgctatgatagacaagaccccttttgctgcaaggcagttgatttctaacatggcagctaactatcaacaatttggtgctagagttacaacaactaaggtgatggctgcaaatgaagcttctgtctctatggttgctgataaccaaagattgaagaacaaattgactgagttgacatcccttgtgaggcaggttgctattgggcagcagcagaatgtgatggcagccaatcaaccaaggctttgtggtatctgttgtgcccctgatcatcctacaaatgcatgccccactctccaagagacaaaacaacctgctgaagtctctgccatgcaacctggccagtcatttagacctcaacaacaatataatccttactccaacacttataatcctggttgaagagatcacccaaatttgaggtatggtcctggcccacaacaacagcagccttttagacctccacaacaacccttccagcctgccaccactaaataccaacctcctccttttagacaacaaccacagttctagcaacctgcacctacatctacacctacacaacctgtgcaggctagttctggaccttctttggaggatttaatgaagcaaatggccaccaacaaccttcagtttcagcaaaatgttagtgccaccatccaggacttgcaaactcagattggacagttagctacaactgtcaaccaaatgcagcagcaaggttttggtaaccttctagcacaaccagttattaatccaaagaatgtgagtgttattaccttgaggagtggcacgaaacttccagatgttggtgctaagagtggtgctggtactagtaaaaaagttgatgatggtgccaagacagattctgcaccaaaatagattcccttaccttttccttctagagccattcctgcaaagaaagtagtggaccttgattctgatctgcttgagactttcaggagggtggaagttaacattcccctcctggatgccatcaaacagattccaaaatatgcaaagtttttgaaggatttgtgcacccacaagaggaagcttaacggaaatgagcaagtgaagatgggtagaaatgtttctgcactgatacagggtaaagctgttgatgccatcccactatccaccttgccaccgaagtgcaaggatcctggcactttctctatcccatgcaccattggtgatattacttttgcagatgccttatgtgatcttggagcctccattaatgtcatgcccacatcagtttatagagcactacaccttggggagatgaaactaactggtgttgtcatccacttagccaacaggagtgttgcgcttccacttggacttattaaagatgtgctgctgtgggtcaataatttgatctttccagcagatttttacattttggatatggagaaggagtcttccagccatggtcccacattgatccctagggagaccattcttgatgacagcaaggaccaaaattgatgtgcatgcaggaactgtttctatggagtttggtgatgacattgtttagttcaacattttcgaggctatcagacatcctgcagaggagcattctatttttctccttgatatcattgatgctgcagtagatagtgtagatatttctgatttactttctgatttttctgatctttttctgactttgatcttggttcttgtaattgtacttgtgatgattctgctggtgtgtgtagcacttgtgcagaaatttcctccgcacttcactctgattgtgttccagatacagatacaagttctgagcctactatcccacttccctcagcccctagtctttccttaccttccactattcagcccccttccttggagctgaagtcactacctgagcacgtcaagtatgcttatttagatgatgctcagaagctcccaatcatcatatctagtagtctaccactggagcatgaagaaaagttgatgaatgttttgagaggccacaaaaaggccattggatggacacttgctgatcttcctggaattaatccttccatctgcatgcatcggatacttttggaggatgattctaaaccagtgaggcaaccccagaggagactgaatcccattattcttgatgtggtgaagaaggaagtgatgaagctactagctgcagggatcatctatcccatctctgatagcacttgggtttctcctgtccaagtgattcctaagaagttgggtatcacaattatgaaaaatcaagataatgagttgattccgactagagtagccaatagttggcgtgtttgcattgattacaggagactcaaccaggccactcacaaggaccatttccctatccctttcattgatcaggttttagagaggttggcaggtaaatcacattattgctttcttgatggtttttctcgttacatgcaaatccacattgcaccagaggatcaacataagaccacatttcactgtatatggttcctcttttgatgcatgtttggatagtctctctagagtgcttgaccgatgtattagttctaaccttgttcttaactttgagaaatgccatttcatggtgcataagggtatagtcctaggacatttggtctctattagaggtattgaggtcgataaggccaaaattgatgtgattacctctttgccttaccctgcttctgtgcgggaagtacgttccttccttggacatgcaggtctttataggagagtcattcaggatttcagtaaaattgcattgccattgtccaagcttctccaaaaggacgtagactttacatttgaccagccttgcaaagaggcatttgagggattgaggaggaagctgactacctttcccatcatgcagccgccaaattgggagcttccatttgagctgatgtgtgatgcctctaattatgcacttggggctgtgttgtcccaaagagttggtaaactgtcccatgtcattgcttatgcttcacgcaccttggatgcagcccaagttaactacaccaccactgagaaggagcttttggctattgtttttgctttagataaatttagatcttacttgctttgctcccacatcattgtctttactgaccatgcagctttgaaatacctgttgaagaagcctgatgctaaaccgagattgatcaggtggatgcttcttcttcaggaatttgacattgagattaaggacagaagtggtgcagaagtggtgtagattgatcacaaatgccattattttttatgagatttttatgtctggggtattgattttatggatccatttcctgtttctcatggcttttcctatattttgcttcctgttgattatgtttctagatgggttgaggctaaggccaccagaactaatgattctaaagttgttgtggattttgtgagatccaacattttttgcaggtttggtgtacctagagccattatcagtgaccaggggagccacttttgtaactggtcatttgcatccttgctttagaagtattgggttgtgcatagagttgctacagcttatcatccccaaactaatgggcaagcataggtttttaacagagagatcaagcaagtgttacagaaggtggtgcaaccaaacaggaaagattggagcaagcttcttgaggatgctttatgggctcataggatagcttaccgcacacctttggggatgtctccctatagggtggttttcggtaaggcatgccaccttccagtggagattgagcactgtgcttattgggaggtaaagagttgcaacatggcatttgatgaagcgggtatgcaaaggaagcttcagttgcaagagcttgaggaggttcgtttggaagcctatgagaacttcaagatttacaaggagaaagtgaagaaatttcatgactctaggattcttagaaaggagttccatagtggccaaaaagtgttattgtttaattctcgccttaagcttatttccgataaactttgatctagatgggatggaccttttgttattactaatgttttccccatggtacagttgagattaaaaatgaagctactggcaaagtcttcaaggtcaatggtcaccaactcaaagcatttcatgagagccctcaagtggaggaagagcgtgtggaggacatctctttggtcctgccaattttgtgtgaagatgtgtcttgaatgacatttggggagtttccttttcccttcttttatttgttgtctctttgttacatttctttgcatgcttacattgaggacaatgtgcatttcaagtggggggtgacggatccttaaaattttgaaaattctgttgttttttatttatctgtctgtctgtttgtcaatgtctgttgttttcagttttctgttagctgtctgtatatattctgtatgtttgttttagtttttgagtgtatgtttttgttgtctgtttctgttgtttctgtctgtcgctgtttgttgctgtttttattgaatttagacactttttcatgtttttcataggattcctaatttgcataaattgtgagaaatgttaaatagttggttggattgagaggtttcatacttgatgtgaatcattgttgtaattgttgaagtgataagtaggcttgagaaatagaatttaagatgaaccatgtgtggtagaattatgccttgtgagtttttgagcctttgtgaatatgttctttcatgtgtgatttcacccttgtgctagattactctatgttttgccttacctcttttgacattccttgttgcacatgctttgattgaaatgatataggccttctttcttttagccactagccaaataagcctatccttgtgttgatatccattgtcaccctctttgagcctttagccttttctttcttgtttagctcattaaaaactaaaaaatgatggaaaatcatgttaccttagctttagggagaaaatgggctttggaattgttttgggagtgagtttcaaacaagtgtggggtgtttgtcttttgttttgttttgaaagaaaagaaaagaaaaagagaaaagaaagagttcaaatagcaaaagttcaaagaaaagaagaaaaagaagaaaagtagaaaaaaaattgtgtataagaaaaaaaaaagaagttcaagcaaagaaaaaaaaatatatgcaataaaagttgttatagttcattttcatccttgtaaattcttttaaatttcaccttgcttctacccttgttttatcttgttgcttgctccctattgtccctcttttctcttaagctttagcctaaatatccttttcttatccacctttccctaagccattcattacaagctaataaagtccttttgatcttttgatgcatatgtgtttcaagttgaatgaatgagaggtttgtcaatgcttggatgtgctagttgcaagtgttgtttgagtgtaaatacaagtcatacacatcatgtgaggttgagtgccaccctttgagagaattctatcaccttggtgcattcttgattctaaacttgactactttttcactttgtgctttgtggtcatgttttcatggattgtttgttacctcaatattattcttccatctttcatctctctcacttttgtgcattgttgtgatccattgaaaaatatgtgtgccttgttcattccctttctttaaatttttggtttactttattttgaatttttttttctcttagtgtttcttttagttttgcccaggagtgcaaaagtttaagtgtggggtattttgatagagtgcttttagttgagtatttttctatccttcttagcttatttgacctctctttgacctttattttcctattctaatttagtttttggcctaggcaagtaagtgggcttaattgctaattgttgcgtatttttgactcacttgacatatctgacttgtttgctagaaatagcccgaggccaattctgtcatttatagggtcattttaagctttgaagttagcgcctctgcacttgtaattttgggctgcaaatttgcatttattggttgtaaatagcaaataattagattgttgggcatgtttgtggcccattttatttttagaactcagtcactacatatattagtgactttagtgaaacttgggcaccactctttacatttcaataaacaagttttatttttcattccttaagtttttagaatcaaacccttgttcttcattttctctctacggttcttgcttgttcttcattgttcttcatttttgtttttctgttcttccattttcgtgcaaccatttcatggggctttcattgatgatgatcatggaagggtaaatcctcaatcaatccaacaatccaacccaagcacaaggagaatttgagttttggtttagtatttcgaatcctatgtgaatgttcatcttcttcttcaattgctattatgttttcatgattatgaatgcgtttaggattgaaaacggattaggttatggattcatttcctaatttcgaacattaatcacagaattaattggatgatatttcagttagggttgtggtttcaatcaatttaggggttaagtcgattgagttgcttctaatgagattgaatgaattttcatgataggattaatttatgagaacaatgatgattcgaattgcttggtgaggtgaattggattgatgttttaaattctgttttacattacttcttttgaattttgttaatttctgcagcactgttctttaattttagtttacgtttttgcaagttttacttacgcacacgaactgtttgataaaattcccccccccattgttattcgtaaattgaagctagaaccatattgattgtgtctctgagtcgacctaggttatctctgtgctacagaattagcttagttaaattgttttgatgtgtgtcgacaacgtgttatcaattatcaaggagtaaagtaaaacagattagaaagcatcaatccaattcaccaacccaagttgttcgaatcatcatcattcccataaattgattctaacatgaacattcattcaatctcaatagaagcagttcaatcgattctactcctaaattaattgaaaccacaaccctaactaaaatatcattcaattaatcttgtgattatcattcgaaattaggacatgtatccataatcctaactcgctttcaatcctaaatgcagtcataatcatgaaaacataatagaaattgaagaagaaggtgaacattcaaatagaattttaaataccaaatcgaaactccaattcttctattgcttgagatggatccttggattgattgatgatttatcctcccatgatcatcaccatggaaagccccatgaaatgagtgcagtaaaataaaaaggatagcaagatgaaaatgaagaagatgaagaacaatgaagaacaaatgagagaaaataaagaacaagagtttgatcctaaaaactaaaagaaagaaaagtaaaactgtttttattgaatgtaaagtgttgtccaagttttcactaaagtcactaatatattagtgactaagttctgaaaatggaatggaccataaacaaactcaacaatctaattatttactatttacaaccatgaaaatcaaattcgcagcccaaaattacaagtgcagaggtgctaactttgaagctcaaaatgacccttaaaatgacagaattggcctcgggctatttctagcaaacttgtaggtattttcgttatctttccagggactcctagaatgctccattaggagatcagtaacactctataggccctgcacaagtcagatatgttaagtgagcaaaaatccgaaaatacaattagcaattaagcccacttacttgcctaggccaaaaactgaattagaatagaaaaataaaggtccaagagaggtcaaataagctaagaaggatataaaaatattcaactaaagcactctatcaattggatattctaattctaactttgcagggtgcaaattggatagaaagagtacaagtggaacatgtcacatgttaggaagctcattgatctcttggcacagcaagaagcaatcatgtgttgccttatctactgctgaagctgaatatatttctgctggaagctgctatgcacaaagtctttggttgaagcaacaacttcaagactttggagttgagataaaggagattccattgctgtgtgataacactagtgcaatcaacatatccaaaaatcctatcatgcactcaaggacaaagcacattgaaatcagacatcatttcatcagagaccatatccaaaagggtaacatcaaaattgaatttgttgaaattaactttcaattagctgatatttttattaagcctttggatagagataggttctacactcttagaaacatgctagggatactagatgaatctagtgtgtgttagcttgacatgtatatgctcattgacatgaaattgcatcattgattggccatttatctcaaaatgatttaaattcgaaatctactgcataatcactattcatattgataatcctactgtgttaatcaattaagtatcaaattaatcgattaaatataattaaaaagctattttgaatgaaaattttacttatgtaatcgattacacatcgaaataatcgattattcttcatgaaagatgtttttccagaaattaaaactctctggaataatcaattacgccatcaaaataatcgattacataagcctaacatccttttataaaattcaaaatcactagaataatcgattacagtgaatggtaatcaattacattgtatgaaaattgcttgaaaacttgaattctttctgtcataatcgattacataagcacattaatcgattacacttcatctttttcgactgaattactatgaaataatcgattacttgacgaaataatcaattactgactttgctgaaactgtttttttcttacgaattaatcaattacataagaatataattgattattcatggagttactgaaaatctgacagaatattcttggaatttgtaactgccgaactgctacctaattcaaaatttgaattttctgtgctttaatgttagtgggttaattcgtagtaactgttactcattccaaatttgaagtttggagcccaaaatcttctttaaattcatattatggtaaaggaagaaatcacaccgttctcatcttctgtcttaagcattattgtatttttttctttcttctgagtttagacactctgttttagtagtcttttctctcattagccatgtctgccccaatgagaaccaaaacctccaaaagaaaagctggtgaaacctctaacctagctgctactaagttagatgggtttccaacagagaaagacaaaatgacctaccttaaattcaatgccaccaaattagtttgtccccctaaacaccttgaccttcaccggtttgtaagtccctactttttcattgaagcccagggattgaaaaagtttgttgaaatgaagggtacattctaccctaagctagtaaaggtgttctacacttgtgctaaggtttccatggatgggacaatcatgtctcaagtaaatggagtggtcatggaaatcacttcagaagtttgggaagcagtggctggactctcctttgatggtgagacaaaatttgaagaagaggctggaggtgtaacgccccagctacaaccagggtcattacgcagccttaattactatcattaacaataatcatcagagttaagcagtttggaagcatacaataaaggaaaagggcatcaacaaatgccatcatcatatacactgtacatatatcatggtgaatatacatcaaggttctgtgtgtctgagtacaaaactgtacatacaactcctcattggggtacaaaataaaaccaaaggcatagtacaaaacatcagagccatctgctcatatcatctagcctaaggtttacaaatcacagctatccctgcataggcttcttgccttgggatctgtctgctcctcctgaggattcacctacaaaacataagccccacacacggggtgagatataaaatctcagtaaactcagggcccttgaaggttttccttcccctggttcacttcaacatatatatgaaataatatatccaagacaatcattctcagattcaaccagaatctcaaccataccggcatcaagcaaccaacgatctcaattctcatccacctggccacaaccaggtgcctcaagcacggcctacaaccgttcatggcataaaccactacctgaccacaatcaggctatacccatggcataccgccattcatcacatccaacactatcctgcagaggctacatttagatatataggaacatctcatctcaggaggctacatctatatactaggaacatctcatgccaggattcaatcatctacatgaggctacatctgtatatataaggacatctccactttaggaggctacatctatataacaggaacatcttatgtatctagcggaggcttcatctgtatatatataggaacatctcaatcaagaggctacatctatatataacaggcacatctccttctaacgaggctacatctgtgtatataggaacatctctgttcaagaggctacatctatattacaggaacatctcgtaacctatctcaacacaattgcctgaggaggctacatctgtgcatataggaacatctccgttcgggaggctacgtctatatcacaggaacatctcactgcaggtcttactcaatctcaagtcgtctatcctactaccataggattatatccattcaattctagaattcacattcagtctaataatcaatcacgcctatcacaggctgaatggctcatagtcatatcaaccaacctcatatcacaacattcacatccaatatatatatatatatgtatatcattccctcttcaaagggttcagcatacatcccaagcatattcaatacatatcattccctcatcaaagggttcagcttacatctcaagcatatacatatcattacatatcattccctcatcaaagggttcaacttacatctcaagcatatacatatcattacatatcattccctcatcaaagggttcaagtcacattctcagcatatcaattcaacacatatcagttcccatcacagggcacagtatacaatctaataatcagtcatatccacattcatgttccacatacacacaattattcacatcaaaccatccctccatttggagcatggtgaaacatagcaaaggacatataatcaaggaccaagagcttacttgctctaagcaaaataccggcttccccggtaccgtggctaccaccacccgagatatcaagctcacgtcctacacaagcaaacacataacgtgtcaacaacggtcctaaaccgttagaatgaaaggaactacaatccttttctacagaacacatgacaattcacttcaccagtgatactcaggccctcattagaacccctctcggcctaaccaaggccccagagtctctcctaagactctactcaggttaacacaaagcacttccatgccttagccttatcatattcaagctcaataatacaacccatatcagctcatagacaacatctttaccatcccaagagcactttatcatctactctagggttcataataaccatgcgctcagctctttctattatgcatgagcaactcagagccaaaatcaaacctcatcaataatgatttctgaaggctctaacatcatcacaacaaccccctgaacacaagtctctacaggaccctgggctaattctaaccccatcacatatgggtcactgttcatgcaaacccccaaactcaaaatcaaacggagaaacttgagtttcttacctcaacggcgtcaaggaagaccctaggaccacctcttcgagctctggtgtccttcccactcaatgggtcttagccactctcaagttctctgagcttttccttggggattccaaaatctcactcaaaaggggtttctcaagagaaaagatgagtgattcaagcttccaatgtgtttctctcactagaataggccataagaaggtgttttgatcaagatctatggctctaggaagcttaagggtctcaacaatggagtatagggcagaaatggggaagaagagccttttctctcttcttttcgcgtccagcacgagctatataaaaactgatttaaaagtctcgtacggatcgcgccgttctccgtgctgatcgcgcgagctggatgaaagcatagcccagatttgggctcccgcgccacaaccgcgttgaccgagccacaggttcgaatctcccacgctggtcgcgccagatccacgcggatcgcgccagctgttcgaagccattgctctaattctaacctctagcgctgatcgcgctataaccgcgctgatcgcgccatctgtccgacccttccacgctgatcacgccacaccccatgcagatcgcgccagttggtcgacacagcctcctgcttttcttaagcttccctcacttgggagactaatgcatggttatatataactaatcttaagcttaaactcatgcttaaaactcagggtattacaggaggctatagtaggatagatacctactgagggatgcttcttgatcctcaaatgaggttgaagcttaggttaagtactggacccatgacacatgaagatagacttcttcattacatcataacatatatcttgacccctagagccaccaaccatgcccaagccactgatgatgacatacagcttttgtatggcatgaaaaacaccattcaaatgaactggatcctcattttttaggagattatgcttaaggctaaaaggctggtgaactatccctttccatatgttattcttgtgtccagattcattgattattttaaaatagatgtctctaatgaggttgttgatcacacaaattcaagcaacagcctcatcaaagagaagcatcttactaagctggggatggtcaagaccccttatggctggcaaatggctggacaacaacttcttgctggtgaacaacaagaagaagctgctaaagaagaagaaggaggagatgttgaagatacaagccctactcaaccatcctacagtcaatttgaatctctaatgatttaaaagatggatgccttatcatcattgcatcatgagcacagggctgagactaattcatctttagatgagatgaaatctaggttggaaaacctagaagctaggcttgttctagatgactttgacaaattagtctaggcttcttgttcttcatgttattgctttcccctattttttttttgttatttttttctgatctatgtaatgtttttcccctttaaatcaatcaaacttgttttctgtcttttcattgtttactatgctatttttttgtctttgataagccaaatagggggagaaaaaaattgattgataattaacaaaaatgaaactctattttgctctctgttgtgctctgtttctttgttggtttatgcaaattaatgattcacgaaattatctaagtcaaaaggagaagactaagtcagggggagctaatctaataaaagtaaatgattaagtgtttatggaaacaaatatcttaacacttgttcttggcaaaaaggatgagttgtttttccaggtaaacaaagttcaaataaagttcaagacttctatctttttcataatcaatatttggcatgttcaacaaaaagggggagattgttgaatatagggggatcatcaagaagattgaagcttaggacttggaagaatgttttgagcttttcacatgccttgaagattgtaactcaaaaggaagtgtaaagaggccaatttgttgatccttgcattgcatgcatttaatcatttaaatgcttaaatattttcatcaaagtataaaagcaatcttttaaaaagaactaattaggaaatgttttggaaaaatgcatatcttactgttttaatcgattacactacggtttaatcgattatttgctttatttttaaatctggaaaagctttgaagaacaatttaatcgattaccatttctagtaatcgattacatagtgttaaaagaaaatcatgctttgccgacttaatcgattaccatttcttgtaattgattacatagtctatttctggaaatcatgtcgttctatgtaaattaattaccatgagttgtaatcgattacataattgttttaaactttcatgggttgctgctttaattgattaccatatggattaatcgattattttgttcatgaaacatttccagaaagctgatgaacaatttaatcgattatttggttaaattaatcgattacatagggcaatttaatcgattacacctacggattaatcgattacaaacagttaattctgttttatataaagcttggtgagtcttttccttataaatagacatattacgacttactcaatacaagatagatttacccataagtttctaagctttcataagtgcccaaaatttctgtgtttctctgagttcaaacaatatcttgtgtgatcaagatttctgagtttcttagagaaaatgttttagaaaaagaaggatttcaagattgtgattctgagctattaatctttgcaacctgaaagtgtggtaacaacattttatttcattcattcatttatgaagcatctcaggttgtgtttatcttgaacctttctttttgatgttttaacaatttctattgttttgtgatatatcattgtgaaccttttcaagcatgctagagtaggattctctagtggttgagattttgagtagggttatcagtatcttggtgatttgtattctaataaggttttagaatctatatctttgtctagtgttgataaagagatcacttgtaaactgcttgtaaagagatcactagtgtgggttggaagcaactggatgtagcctccaaggatgagaggtgaactagtataaactggtgtgttctttattctaattttgttcttctctcattgtttgaatttggttgatcaagaaattatcaacaagatttgtttttaggcattgtttgaattccaagggtgatattggtggaaagaaagattttgtacttacaaagttttaagtgatacgatctatattttaaatttcgcaaattttttgaataaaatcttcaagaacttgagctctcactcatgatgtgaagcaaaaaaggcatgaagtagctccaaagaattcaacaatggaagatggattgagacaaggaatgaagatggatgacgccatggagaagctctccaatgagtctaggaagaattgtcacaatagcattgaaaaaaatcattgataagaaccaagaagttcttgcacaagaacaagagagaaactctcacaacgaaattcagctttcttattgatttaaccaaaaatgtgtacaatatgtttgggttggccttatatagccacaaaaatgtaagctaaatgcaagtgaaatggcaaatgaaatgaagcttgaggtgcaaactaaagaagcttaaagtgcaagctaatgaagcttgtggtgcaagcttctcatatgatgactcagccacgtgccaatgtcagccatgtgcattttacaagcttacatgctaaaaaaattacatacaaatgcacctatacttatttacacaattgccactaaaggcctttttattgccactaaaaggcctatttattgccactactattgccactaaaaggtactggaattaaattcaacttgagagtacaaaatccaacccttgttcttcttgagttggtgtgcttcttcatacttgtctaaaaggtgaaagttagctttgatgtgttcttgaagggcttgagttctagctcttgtcatgggtcctttaaagctaaccaaaggaagttcttcaagttcttattcttggccttgagcttgcaatggacctccatcatcccctccttcttgaaaggaactttacctcaagttttctctctcacttgtacatatatcacacaaagaaagaaaacaaacattaaaggtgttactcacaccatactcaattggcaactcaattttatatgcattgttgttgatcctctctaaaatcttaaaaggtccatctcctataggttggagcttggatttccgttcttgaggaaatctatccttccccaaatgaaaccaaaccaaatctctttcattgaagaccacttgcttcttgtgcttattagcttgcttagcatattgttccatcttcctctccacatgggccttcaccttttcatgcaatttcctaacatacgaagctttagacaaagcatcatgattaatcatagaagaagtattaggtaatcaagaggagttaaaggattgaagccatagacaatatgaaaatgagataaggaactggtcttgtgaatcattctattataagcaaactcaatgtgaggtaggcactcctcccaattcctcaagttgcccttgatgtagcatctaaggagttgacccaatgtcctattcactacttcttttggccattcgtttgtcagtggcaagttgatgaaaacaagagctttgtgccaagcttaccccataatgtcttccaaaagtggctaaggaactttgtgtctctattgataaacacgttgtcgacacgcaccaaaacaattttactaagctaattttgtagcacagagctaacctaggtcgacccagagacacgatcaatatggttctagcttcaattcaatggtaacagtaaggggggaattttatcaaacagtttgtatgcgtaagtaaaacttgcaaaaacgtaaactaaaattaaagagcaacacaaaaattaacaagattatcaacaagtgagtaaaacagattagagaagcatcaatccaattcaccaaaccaagcaattcgaatcatcatcattctcagaattttatcctatcatgaacatccattcaatctcattagaagttgttcaatcaaattaacccctaatttaattgaaaccacaaccctaattgaaatatcatccaattaggcatgaatccataacttaattcgctttcaatcctaaacgcattcataatcatgaaaaacagaatagcaattgaagaagaagatgaacattcaagtagaattcgaaatactaaaccagaactccaattctccttgtgtcttggttggttccttggattgattggtgatttagccttccatgatcatcatcaatgaaagccccatggattgagtgcacgaaaatggaagaatagaaaaacgaaaatgaagaacaaggaagaacagtagagagaaaatgagagcaagggttttgatataaaaaactaaaggaaagaaaaataaaacttgtttattgaaatgtgaagagtggtgcccaagtttcactaaagtcactaatatgtagtgactgagttctgaaaacgaaatgggccataagcaaatccaacaatctaattatttgctatttacaaccatgaaagtcaaatttgcagcccaaaattacaagcgcagaggcgcaaacttccaagcttaaaatgaccctctaaatgacagaattggcctcaggctattcctagaacgctccattcagagatcggtagcaccctataggtcctgcacaagtcagatacatcaagtgagtcaaaaatctgaaaatacgcaacaattagcaattaagcccacttacttgcctaggcccaaaaactgaattagaataggaaaataaaggtcaaagagaggtcaaataagctaagaaggatagaaaaatattcaactaaaaaccctctatcaaaatcccccacacttaaacttttgcactcctagacaaaactaaaagaaagactaagagaaaaattcaaactaaagtaaaccaaaaatttaaagaaagggtatgaacaaggcacacatatttttcaatggatcacaacaatgctcaaaagtgagagatggaaagatggacgaataatattgaggtgacaaacaatccatgaaaacatgatcacaaagtgcaaagtgaaaaagcagtcaagtttagaatcaagaatgcaccaaggtgatagaattctctcaaagggtggcactcaacctcacatgatgtgtatggcttgtatttacactcaaacaccacatgcaactagcacatccaagcattgacaaatctctcattcattcaacttgaaatacacatgcatcaaaagatcaaaaggactttattagcttgtaatgaatggcttagggaaaagtggataagaaaggatatttaggctaaagcttaagagaaaagagggacaatggggagcaagccaacaagataaaagaagggtagaagcaaggtgaaagttgaaagaatttacaaggatgaaaataaagtataacaacttgtattgcatatattttttttccttgcttgaacttctttttgtttgtttatacacaatttttttttctacttttcttctttttcttcttttctttgaatttttgctatttgaactctttcttttctctttttctcttttcttttctttcaaaacaaaacaaaagacaaacaccccacacttgcttgaaacccactcccaaaacaattccaaagccccttttctccctgaagctagggtaacatggttttccatcatttttttagtttttaatgagctaaacaagaaagaaaaggctaaaggctcaaagagggtgacaatggatatcaacacaaggataggtttatttggctagtagctaaaagaaagaatgcctaaatcatcttaatcaaagcatgtgcaacaaggaatgtcaaaagaggcaaggcaaaacatagagtaatctagcacaagggtgaaatcacacatgaaagaacatattcacaaaggctcaaaagctcacaaggcataattctaccacacatggttcatcttaaattctatttctcaagcctacttatcacttcaacaattgcaacaatgattcacatcaagtatgaagcctctcaatccaaccaactttttaacatttctcacaatttatgcaaattataaatcctatgaaaaacatgaaaaagtgcccaaattcaataaaaacagcaacaaaacagaaacaaacaacaaaaacatacagactcaaaactgaaacagacaaacagaatatatacagacagataaacagaaaatagaaaacaacagacattgacaaacagacagacagataaatagaaaacagaaaacaacagacattgacagacagataaacagaaaatagacagaaaatagaaaacagaaaataaccagtgtttcaaaaacaaaaattttaaggacccttcaccccccacttgaaatgcacattgtcctcaatgtaagcatgcaaagaaatgcaacaaagagacaacaaataaaagaagggtaaaggaaactccccaaatgtcattcaagatacatcttcacacaaaattggtaggaccaaagagatgtcctccacaagctcttcctccacttaagggctctcatgaaatgctttgagttggtgaccattgaccttgaagactttgtcggtaccttcatttttaatctcaactgcaccatggggaaaaacattagtaataacaaaaggtccatcccatctagatcgaagtttaccgaaaataagcttaaggcgagaattgaacaataacactttttggccactatggaactcctttctaagaatcctagagtcatggaatttcttcactttttccttgtaaatcttggagttctcataagcttctaaacgaatctcctcaagctcttgcaactgaaggtttctttgcatactcgcttcatcaaatgccatgttacaacttttcaccgcccaataagcacggtgctcaatctccactggaaggtggcatgccttaccgaaaaccaccttatagggagacatccccaaagatgtgcggtaagcagtcctatgagcccataaagcatcctcaagaagcttgctccaatcctttctgtttggttgcaccaccttctgtaacacttgcttgatctctcggttaaaaacctctacttgcccattagtttggggatgataagcggtagcaactctatgcacaaccccatacttctgaagcaaggatgcaaatgaccggttacagaagtggctcccctagtcactgataatggctttaggcacaccaaacctgcaaaaaatgttggatctcacaaaatccacaacaactttagaatcattagttctggtggccttagcctcaacccatctggaaacataatcaacagcaagcaaaatatatgaaaagccatgagaaacaggaaatggacccataaaatcaataccccagacataaaaaatctcataaaaaataatgggttgctgaggcatctcatgtctatgtgtaattgtgcctcctactctctgacactgctcacaagtggtggtaaagtgatgagcatctctaaacaaggtgggccaaaagaatccacagtctaataccctcctagcggtcctctgaggaccaaaatgacctccgataggtgtgccatgacaaaactgaagaatagactgaatttcatggtcaggcacacaccttcggatcacttggtcactaccaaacctccacaaataaggataatcccaaacataatatttagcatcactcttaagtttagctatttgggacctagatgtatgaggtggaacaacagatgcaacaaggaaattaacaatgtcagcaaaccaaggtgtgacatgcgatgaatgcaaatgcatcaagtgctcatcaggaaaattatcacgaatgggaaaggactcaagaggtccctcaatcctactcaagtgatcagccactaagttttctgcaccacttctgtccttaatctcaatgtcaaattcctgaagaagaagcatccacctgatcaacctaggtttagcatcaggcttcttcaacagatatttcaaagctgcatggtcagtaaagacagtgatataagagcaaagcaagtaggatctaaatttatctaaagcaaaaacaatagtcaagagctccttctcagtggtggtgtagttaacttgggctgcatccaaggtgcgtgaagcataagcaatgaaatgggatagtttaccaactctttgggacaacacagccccaagtgcataattaaaggcatcacacatcagctcaaagggaaactcccaatttggcgactgcatgatgggagaggtagtcagcttcctcctcaatccctcaaatgcctctttgcaaggctggtcaaatgtaaaatctacgtccttttggagaagtttggacaatggcaatgcaatcttactgaaatcctgaatgaatctcctataaaaactggcatgtccaagaaaggaacgtacttcccgcacagaagcgtggtaaggcaaagaggtaatcacatcaattttggccttatcaacctcaattcctctactagagaccaaatgtcctaggactataccctcatgcaccatgaaatggcatttctcaaagttaagaacaaggttagtactaatacatcggtcaagcactctagagagactatccaaacatgcatcaaaagaggaaccataaacagtgaaatcatccataaacacctccatgcaactctctaataaatcagaaaagatacttaccatgcacctttgaaaagtgccaggtgcgttgcataggccaaaaggcatccgggtgtaagcaaatgtgccaaatggacaggtgaatgtggtcttatgttgatcctttggtgcaatgtggatttgcatgtaaccaaaaaaaccatcaagaaagcagtaatgtgatttacctgccaacctctctaaaacctgatcaatgaaaaggagaggaaatggtccttgcgagtggcctggttgagtctcctgtaatcaatgcaaacacgccaattgttggccactctagtcggaatcagctcattatcttgattcttcacaactgtgagtcccgacttcttaggaaccacttggataggtgaaacccaagtgctgtcagagatgggatagatgatccctgtagctagtagcttcgtcacttccttcttccccacatcaagaatagtgggattcagcctcctctggggttgcctcactggtctagaatcatcctccaaaagtatccgatgcatgcagatggaaggattaattccaggaagatcagcaagtgtccatccaatggcctttttgtggcccctcaagacatgcatcaacttctcttcatgctccagtggcagactactagatattataactgggagcttctgagcatcatctaaatatgcatacttgaggtgctcaggtagtgacttcagctccaagggagggggctgataagtgccacatttcagttaatctcatgtttaaaatattggcacttatcttttgatctctttcatttagcttataaatttccctaaacctagttaattagcaccttatacttgtgtttaaagtgtttcggaagattaatccaaatcatgttgtgtatttgatagattctgtggatttccgaggcttccggatatcaaagcaagcaaagaaggcttatatagcaagtatgggaggtgcaaccagcatttcaggcccagaaaccgacatggcccaaagctttcttcaacattaagactttaactcgcccaggcgagtgagcataggcaaaatcagtggcctgggcgagctaaaagttccaaaaagataagttaagctggcccaggcgaccagaacatgaagaaattggtggcctgggcgaccaaagctggctggtggtgatttcctataaataggccacgaatccatggagttttgcatcattttttggagattctctctcccgcactagccttagactttttcttggggtttaggtgcttaaatattagtattaagtaggttaagaaagtgagagaagtgaggattagcgtggaaactctgccggagagaagcgaggatgggaacgttcagcagcttctttcgagaggaggttctctccatgctgagctagcttcttagaggttggatgtaatcttcttaaccctatacttcttatattattcatgcatgaatcgttctatttcttattggtagtttcgttctgcgcttaattcttgattctacttgatcactagtatcatgagcttaaatccaaagtgagactggaaagtaatcttaggatttgaactgaatgaaattactcgttacgttacgttgctaggaatagggcataatgttttgattgcataaaagcacgcgattataattcttaacgctggggtaatttacttaaatatgcgagggatcgatattcggtaaaatatccttagaacttggatgcgaggaatagattcaaggtaacttagtgtgcatcaataagaatagacggtgatttatacatggtaaatattaattgaatataggacgttaagaatgatgaaatccaatcccgctttatcataaatatattttcattttcgttaagtttagttaatttactttactagcatcaacaaatgaaatatctttcaacctacttgtgcatatctattcaactgtttaatttatttggattaactgagtaagctcaagtccatatggagacgatctttataaatttgaaacttacaacgataaaacggtacgcttgccatggtataaaaattcctaacaagtttctggcaccgttgccggggacttgagtcgctcgctcagttctttcaaaattaatttctcagttgaataggactctttctttgcttttgttgtttttaattttttataaattatcttctgttttatttttccttccctaaccttggtacttacaaattattgcaaggttgttctttttcctttttgaggtaaatttcttgcagctacatcgataattaatttagaaaattaccgaaggaaaaacaaacagccaaaaagctaccgagagaaacttcttctattttgtctccttcatctataaaagcaacctctaaatatgacagatagaggaggagaggaaaatagaccacaaaggaggactctgggagattatgcgtatcatcaaagacaaagcattacaacagcataatcattcctcctttcagtaaaaaagttgtggaattgaagcctgcattgctcagtttaattggatcacatccttttgccggactaaatcatgaagatccatacactcatttgtccaccttcatggagctgtgcagtactatgggagcctctgatacagatgctgaggttgtttatctcagagcttttccgttctccttgacaggtaagacaaaggtatggcttcaatcctaacctaataaatgtcttaacacttaggaagaagtggaggaaaagtttattgcaagattctttcccccatctagattcataaatgcaaaatctgctatagccactttctttcaaggtgttaatgaatctctctgtgaaacatgggagagattcaaatcattactgcgtaggtgtccaaaccataactttgatgatattgcacaattacatattttctacagtggtttgagaccccaaaccaagatgattcttgatgcctcagctggaggtacgatgatgtcaaagagcccggaggaagcaattgtaatcattgactctatagcagccagtgattactaatctcatcatgatagatctccgattcaaaagaaaaggtataatggagctggatactcaaaatgcaattctagctcagaataagctcttgactcaacaaatagaggccttgaccaaacgaataggccaacttcctcaactaaatggtgattgccaacaagaagagcagacttattatatgcagaatcagaccagacctcaacaaaacttccaaggaaattatcaaggctacagagatggtccaagttcttatggctggaagcaacaatatgaaaatgcatattatgattccactaactcttctttttcatgtccttctaacaacttttatgtaggttcttcaaataggggtcaacaacaagaagaagctcagcctgatagaatatcaaaaatggaagatactctaactcagtttatgcagatgtctatttcaaatcaaaagaatattgaggcttccatcagaaatctcgaggttcaggttggacagcttgcaaagcaagtgtctgagcacagaagtggaccctcttcagcaaacacatatgataattcaagagaaccaagagaatgttatagagtggatgtcttgaatggaggaaattctgactccaagaagttggctcaaggaaaaggttatacattagcagaagcattggaggagatgagtgaagctaaagaagaagatagtttagatcatctccaacaaatagatgcttacaaagaaaatccttgccaacaatcattctttgagaaatggccagaggaagacacaaatcaagaatcacagaaaaaggtaaacgcagtacctccgtatgctaacactgttttccttgcaggaaattcaaagaaaccagttagcaataaatctgaaaaagaaaagagactggtaaaaatattggaggaaaattgatgtgttgcaaacacatcttatttttagaatagttttagcttatgttttgagtaaataattaggatttagtttagttttggttagtttattaatattattttattttatcttatttcaatatcaattatgcaatttcaggacaaaagaggagaataaaagccaaagaaagaagaaaacaagatctggagactcacgcgggtcgcgccactatccacgcgggccacttggaagaccagagaagatcacgcgagtagcgccgttactcaagtgggtcgcgtggaaatctccaggtttaagccatttcagctctgccaatccacgcgaagcacttcacagtccacgcgactcgcgtcattcatttctgccgagccgcgcgactcgcgtggtatcgcgcgcgggtcgcgtggaatcaatttagtttccttatttaaatcatataattcaagatttggtattatattaggattagttgccttaattaagtgattctataatatatttagtttccttaattaagaagatttgatttagatttggaatagaaaataggccttgttaccttaattagatctatctataaataaaggcctctaggaagagaatagggacatctctaaccatccaccatcaccttctatcatccattctactctctccttctcctattttcaccattggaagtcaagaatcaaggcaaggtcactcaagaatgttctatttgatagtttttggtttcttgaagcctatggcaggctgaacttgtattgtgggaaggccatgaactgatgtaactcctctgtaacttgaattggtattgattctaatgctgttttgattattttattctactctgtgccatttaatgttttattcttatttggaattggccattctatttaagtattaagggttaggattcacaatggacacgttggggttctaatttctgacatgtttagaataatagtcgttcttcgcctagacatagggatgcgtggctacggactttataatatgttctttttcatgcttaacttaatagaattcaccaagacattgggtttttgaattaggttaaaggattgattcactaagacattagggattaactaacttaggaaaggcttattttccgaataatcttaacaagatcacatgagatatattctttgaatacttagtttgacagattcgctaagggtttaggtttctcgatcaactaaagggtgaaatcgctggttaatgctcttaagagtctaggatttacgaaattaggaaagatttatcaaatgtgtgacctaagataataaaccaatcaagtgaaggaggtaggaacaaaggggattgtgcctgaccataattgtttcttccattggtaacttctttatctttttacttacttattttctattttgattcaatcatccaatatcaacaattatctctttattatttctgttttattttccaatcatttagaattaatattattgtaaaaattaccccaatccctgtggagacgataactcacttacctattttattacttgttaacgatcggtgcacttgccgtattcgcataaatcacacaacaaaaatacaaaagcgaaaggctcatccgtattgtccaattgctgggagccgaaaccataacaaaggcgtccagctaatacgacgtaaaagaagcgttcctgggaggtaacccagtgtttttaaattctgactttatttattgtctttatatcttatctttttgaaaatatcatctgttttgttagaacttggttataggtccattttgttaagaagaagggaaaagtaaggaaaagaacgtggcagattttgttgaatagctgaagggaaggacatcaagcttcccaaccacgaacttcaaaaaacagtgatatcgttttaaatttctttattgctttatagttttaaattcagtactttgtttatttatttactatgtttgcttctttttgcttgcacatagaagtttctcttttctagattacacatgctaaaatactttttgtttttcttttttagacttaactaatatatggtgttttgaaaagaatcaactgaaaatgttttgaaacttcttttaaaatatcagaaccacaaaaatgaagtttttgtaggaaaccttgagaaatgaaaaacaagaataaatggtcttttcagaaaaatcaaaatcaaggtaaaaaagtctttttacatggaaattgataaataacttcagtaggaaacaaatgatttggttgagaacatgaaaacataccttaagcccaagtgagtgtgtgcatccaaacagacattacacaaagagagatctcactggtataatctatagtaatttttgcatgaatttctaattgtcataagcatatgattcatggatatgatttaggccatctttcttttttgaacatattattagccactagccaaaaagctatcccaagtatatcaaatgatttatcctttgaaaaccccctttgagcctaaacagttgatattttattgaaaccctagcctaggataggaattccataccctacctaaggttaggagagcaaaaagggagtgagtcgctatggaagatttttgtggatagttatgttatgagaatgggaaaaaaaattagcagtggttatatgttatttatgtgaaaaagaaagagaaaagaaagaaaagaaataaaagaaaagaaaagttgggtgaaaatgataaaaataagatgtcttggaaaaagaaaaggaataggaagtgaaagatctaattgtctatatttctagcttgctctcctagtcctaaggtctttcgaatacctagaaaaaccaagatttctttctagccaagcccagccatgaaagacctaatgatccatgatgagtatgtattatgattagacgggaaatgaactacaaattttacctatgatatatcagtgatggatatgagagtaaacacttacctttgggagaattaaacactttttgagaggttttcctctgtttgatatcagtcacatgtttcctctgaggtctttttgaaacgaagtgtaaatttgactttaacctcattttgatttcatgaaaatccatcaaattgttttctcaaagtatcaaggttaactacttcttgaaaaatctgttctgatcaaagattaagttgattcttgtcaaaacatgatattctttacctttgcttgaggacaagcacgattctacgttggggggagttgataagtgccacatttcagttaatctcatgtttaaaatattggcacttatcttttgatctctttcatttagcttataaatttccctaaacctagttaattagcaccttatacttgtgtttaaagtatttcggaagattaatccaaatcatgttgtgtatttgatagattctgtggatttctgaggcttccggatatcaaagcaagcaaagaaggcttatatagcaagtatgggaggtgcaaccagcatttcaggcccagaaaccgacatggcccaaagctttcttcaacattaagactttaactcgcccaggcgagtgagcataggcaaaatcagtggcctggacgagctacaagttccaaaaagataagttaagttggcccaggcgaccaaaacatgaagaaattggtggcctgggtgaccaaagctggctggtggtgatttcctataaataggccacgaatccatggagttttgcatcagtttatggagattctctctccctcactagccttagacttgttcttagggtttaggtgcttaaatattagtattaagtaggttaagaaagtgagagaagtgaggattagcgtggaaactctgccggagagaagcgaggatgggaacgttcagcagcttcttccgagaggaggttctctccatgctgagctagcttcttagaggttggatgtaatcttcttaaccctatacttcttataatattcatgcatgaatcattctatttcttattggtagtttcgttgtgcgcttaatgcttgatcctacttgatcactagtatcataagcttaaatccgaagtgagactggaaagtaatcttagggtttgaactgaatgaaattactcgttacgttacgttgctaggaatagggcataatgttttgattgcataaaagcacgcgattataattcttagcgctggggtaatttacttaaatatgcgagggatcgatattcggtaaaatatccttagaacttggatgcgaggaatcgattcaaggtaacttagtgtgcatcaataagaatagacggtgatttatacatggtaaatattaattgaatataggacgttaagaatgatgaaatccaatcctgctttctcataaatatattttcattttcgttaagtttagttaatttactttactagcatcaacaaatgaaatatcgttcaacctacttgtacatatctattcaactgtttaatttatttggattaactgagtaagctcaagtccctgtggagatgatctttataaatttgaaacttacaacgataaaacggtatgcttgccgtggtataaaaattcctaacaagggctgaatagtggaaggtaagggaagactagaagctgaggaaagtgggatagtaggctcagaacttgtatctatacctggaacacaatcagagtgaagtgcggaggaaatttccgcacaaatgctacacacaacagcagaatcatcacaggtacaattacaagaaccaagatcaaagtcagaaaagtcagaagaaagatcagaaaaatcagaaagtaaatcagaaatatctacactatctactgcagcatcaatgatatcaaggagaaaaatagaatgctcctctgcaggatgtctcatagccttaaaaatgttgaactgaacaatgtcatcaccaaactccatagaaacagttccagcatgcacatcaattttggtccttgctgtcatcaagaatggtctccctaggatcaatgttgacccgcaccagcacatcttctataagtccaagtggaagtgcagcactcctgttagctaaatggatgacaacaccagtgggtttcatctccccaaggtgtagtgctctgtaaacagatgtgggcatgacattaatggaggctccaagatcacacaaggcatctgcaaaagtaatatctccaatggtgcatgggacactgaaagtgccaggatccttgcacctctgtggcaaggtggagagtgggatgacatcaacagttttaccctggatcagtgcggaaacatttctgcccatcttcacttgttcatttcccttaagcttcctcttgtgggtacacaaatccttcaagaactttgcatattttgggatctgtttgatggcatccaggaggggaatgttaacttccaccctcctgaaagtctcaagcagatcagaatcaaggtccactactttctttgcaggaatggctctagaaggaaaaggtaagggaatctgttttggtgcataatctgtcttggcaccatcatcaacttttttaccagtaccagcatcactcttagcactagcatttggaagttctgtgccactcctcaaggtaatagcactcacattctttggattaatgactggttgtgctggaaggttaccagaaccctgctgctgcatttggttgacagttgtagctaactgtccaatttgagtctccaggtcctggatggtggcactgacattttgctgaaactgaagttggtggccatttgcttcatcaagtcctccaaagaaggtccagaactaaactgcacaggttgtggaggtgtaggtgtaggtgtaggtgcaggttgctggaattgtggttgttgtctaaaaggaggaggttggtatttagtggtggcaagctggaagggttgttgtggaggtctaaaaggctgttgttgttttggaccagggccatacctcaaatttggatgatctctccaaccaggattataagtgttgaagtaaggattatactgctgttgaggtctaaatgattggccaggttgcatggcacaaacttcagcaggctgttctgtctcttggagagtggggcatgcatccgttggatgatcaggcgcacaacagataccacagagccttggttgattggctgccatcacagtctgttgttgcccaatagcaagctgcctcacaagagatgtcaacttagtcaatttgttctccaatctctggttatcagcaaccatagagacagaagcttcatttgtagccatcaccttagttgttgtgactctagcaccaaattgttgatagttggctaccatgttagaaatcaattgtcttgtagcaagaggggtcttgtccatcagagcgcctccactagctgcatctatcatactcctatccatcaacatcaatccttcataaaaatattgaatcagtaattgctcactgatttgatggtgaggacatgtagcacacagcttgttgaatctctcccaatactcatataaggactctccaggaaactgtcttatgccacaaatttcctttcgaatggatgttgttctagaagcagggaagaatttctccaagaatcttctcttcttgtcagtccaagtggtgataggatctggttgaaggtacaaccaatccttagcaacaccatccagagagaaaggaaatgccttcatcttaacataatcctcatggacatcatgtgggcacatggtggaacacaccacatgaaactctttaaggtgtttttgtggatcttcaccaacaagtccatgaaacttaggatgcaaatggattaatccagatttcagttcataactgacctcggtctcagggtattaaatacaccaaggttgataaacagcatctggtgtagctaactccttaagagttaggttgttatcagccatgatatcaagatgtgtagaagtagaaggagtagaaacagattcagaatcaaagtcagaagatactacactactgtctaaaactacactatcaaagtcatctaagtcatctaacctagggttatgtctgtttaatctgtgaaatgtcctatctatctcaggatcaaatgaatgtaattcacttgatgtggacccagtcatacacagttcagatcataaggaacaataaatacagacagcacagaaatatcaaacagttatactaccaggacactaccaactatatatgctgaaatgaaatagaaatttgaaaactgtcctaaaaatttttgaaaaaatctaaaaaaataacagtgaatgcctaaaaatcatgattgatttttgtgatttttttggtgatttttaaaaatcatgaacttagaaaattgcctaaaaaatggtctaaacgatggaatttggcaaattcaacttgatgtatgaattttccgcaccttctggtaaaattttagcccattccgagatagtttgctgtgaaattaccagaatgcccctgcgccaattgtaaaaactggtccaaaactcttacttagagttcgaatttgccaatttgaacccacacccaaaggggttgtttttgtttaaaatgggggataaaccttggggaacaaatcgcaagtcaaactgcacaagttgtaaaaattttgggatagcaaaatgacactacaaaaacaactacactacactactttctccctactactactctgttttttttctctgtttttgctctgttttttttactgttttctctattttttggcagcacacatcaactctacttcataatgcacagcatcaacaatgcaaatatgtgacaaagtgcaattatgcaacagaatatcaatatgcagtgaatgtatgcaaatgattttatatatatatatatatatatatataactactactatgaactatttacagcaaattacagctagcacacaataaaccgtgtccccggcaacggcgccagttttgataaacacgttgtcgacacgcaccaaaacaattttatcaaacagtttgtatgcgtaagtaaaacttgcaaaaacgtaaactaaaattaaagagcaacacagaaattaacaagattatcaacaagtgagtaaaacagattagagaagcatcaatccaattcaccaaaccaagcaattcgaatcatcatcattctcagaattttatcctgtcatgaacatccattcaatctcattagaagttgttcaatcgaattaacccctaatttaattgaaaccacaaccctaattgaaatatcatccaattaattatgtgattaatattcgaaattaggcatgaatccataacctaatccgctttcaatcctaaacgcattcataatcatgaaaaacagaatagcaattgaagaagaagatgaacattcaagtagaattcgaaatactaaaccagaactccaattctccttgtatcttggttggttccttggattgattggtgatttagccttccattatcatcatcaatgaaagccccatggattgagtgcacgaaaatggaagaacagaaaaacgaaaatgaagaacagtagagagaaaatgagagcaagggttttgatctaaaaaactaaaggaaagaaaaataaaacttgtttattgaaatgtaaagagtggtgcccaagtttcactaaagtcactaatatgtagtgactgagttctgaaaacgaaatgggccataagcaaacccaacaatctaattattttctatttacaaccatgaaagtcaaattcgcagcccaaaattacaagtgcagatgcgcaaacttccaagcttaaaatgacactctaaatgacagaattggcctcaggctatttgtatcaaacttgtagatattttcgttatctttccagggactcctagaaagctccattcagaggttggtagaaccctataggtcctgcacaagtcagatacgtcaagtgagccaaaaatccgaaaatacgcaacaattagcaattaagcccacttacttgcctaggcccaaaaactgaattagaataggaaaataaaggtcagagagaggtcaaataagctaagaaggatagaaaaatattcaactaaaaaccctctatcatctatcactcacaatgcttctaggcaatccacgaagtctcaccacttccttgaagaagagattagccacttcacaagcatcatcattcttgtgacaaggaatgaagtgttccagctttgagaacctatcaacaacaacaaatataaaatcctttcccctcttggatcatggaagaccaagcacaaaatccatggaaatgtcaacctaaggggagttaggaataggcaaaggtgtatataaaccacgaggccttaatctagatttagctttatgacaagaaatacattgagatacaagcttatgcacatcatgcctcatttttgaccaaaataaatgttcatgtaaaatagtcaaagttttatccacaccaaagtgcccatcaaattgttttcatgagcttccctaatgaaaagttctctcaaagagctttcaggataacatagtctcttctccttgaaaaagaaatcatcatgtctaaaatatccttgattatcacacaaagcaaaaatactagagaagtcattatcacttttatgtgattaaaaccaagcaacttactttcaagcataaaaatcaaacaatgcctccttgataaggcatctgccactacattcaattttccttgcttgtgtttaataacataaggaaattcctcaataaattcaatccaattagcatgtctcttgttgagtttgccttgacttttcaaatatttaagatacttatgatcactatggatcccaaattccttaggtaaaagatattgttgccaagtttgaaatactctaacaagtgcatataactctttatcataagtggaatagtttgaacatgcaccctttaatttctcactaaaataagaaataggacgtttatcttaaatcaaagccccgccccccccaacgcctacattagatgcatcacattcaaattcaaaagaagcattaaaattaggcaatgcaaaaataggtgcatgagacaatttatccttcaatgtttgtaaagcaatttcatgttcttgcttccaagagaagctcatggttttctttatcaactcattcaaaggagaagcaaatggtaccaaagtcctttacaaatctcctacaaaagcttgctaaaccatggaagcttctaacatccttcacaatctttggagttggccactccatgaacaactttcaccttctagaaacacaacttgtgaagtgcaaaaggtacatttataaatatctccatacaaggtttccttcctaagcacctcaaagatacttttaacatgcatcaaatgatcatttaattggcactataaacaagaatgtcatcaaaatacactaccataaactttcctataaagtgtctaagctcatgattcataaacctcataaaggtactaggtgcattagagcatctttagtgcaagatcttaagcaaggatcttgagctcaagatctgattttcactagatctcccaataaaggagtttaagatatacaacatggaggatgggttcttgtagaagatcccttaagatttgcacattgttaaaaaaaattctttctttttctctctccctaagatctcaaaatgagatctatcattaaacaaaaaaatggaagagatcttgagagatctttaatcctatgtgacactatgggatctaccaaaaagtagtctaagaccccaatttgagatctaccactaaagatgctcttagtcaaaccaaaaggcataactaaccattcataaaatccaaatttagttttgaaagtcgttttccattcatccccttccctcatccttatttgatgataaccattcttaagatcaattttagagaagatagtggaaccatgcaattcatctaaaagatcattaagtctagggatagggtgtctataccttaaggtatgttgtttattgccttaaaatcagtacacatcctccatgttctctccttcttagacacaagaataattggcatgacataaggactcatgctctcacagatccaccccttgtcaagtagcttttccacttgcatttgaatctccttttcctccatgggtgaagtcttatattctggcctattaggtagcgaacaacctggtatttaattaattttttgctccatgcctcttaaaggaggcaagccattaggaatttcttttggaaaaacatcttcatttcctccaaaagagattgcatggctataggcaatttttctccttctttttcaacatgcaaacaaagagagttaggaaccatataataaagaggttgtctttctaataacactctcttgagctctttttctctcaagaataaactctctttgatctcatgaatttttttgctcttaatttgtttttcttcttttttctctctttttttctcactagttttccgcttggataattcactgtttttgcctttttttattgctatcaagtacaatgttttttaagctcttgaactctcttttctttcatcctcacttgatcctcacacacttgtttagaagtcaaaggtctcaatttttttgcctaaatgctcaaactcaaaagtgttctccacgccattgtgtattacttttctatcatattgtcaaggccttccaagaagaatatgtccagcctccataggtacaatgtcacaaataacttcatccttataagagttaatagaaaaaggaatgtgcacttgagaatttaccaccacttctccactctcacgaagtcattggagcttgtatggcctaggatgaattgtggttggtaagtgtattttctacaagccttgtactagccacatttgtgcatctgcctctgtcaattataagtgagcacactttgtcttcaactaagcaccttgtgtgaaaaaatattttcactttgagtctcctctttgtcaatgcaaaaattgctcaacattctcctcaccatcaagagatcaccctcaatggcttccacatgtgtaagcccttcttgatggatatagggggagctagaagaagatcaagtcaaggatgaagcctgtgtcttagaagaaatattttagctttttacatgccaaggcatttgtaatttgttaggtgtttgagaggctaatcttatgatccttgcattgcataaatcataatcataatcatgcatacatgttttaagaaaaggttgaatgattacatgatgtatgtggaatgattctctcatgactttgttttttaaaaagcaaatatgtctgctttactcgattactctgtttctgtaattgattacataagcaaaggatatttcagaaaagtcatatagaacactttaatcgattacgagccaagtgtaatcaattacatagttcatttcatacattaagcatgtctatcttaatcaattaccactcttctgtaatcgattactgaagcttattttctaactgagtctatttgctttaattgattacgccttagattaatcaattacattgttcatcaaagttttccagaactgctcaagaacattttaatcgattaagtttgtatttaatcgattacatatggctatttaattgattacattcagttacaaatgttttctatataaagttgttgagtcttttattttgaacataacttgattttgcgaaatactcattacttacaaaagctctcacagtctgagaaaagagattccgagttacattgattttgtttccaaacctagaattcatgcatcattgatcatgttggtttgaacaagatttgtcaagagtttttcaaagagagatgattccaataattacttacattcaacctgagtttgtttggtaaaattcattcattcatcttctgaggatcatgagattgtatatctcttaaactcttgcagtgatttgattgtttacttttatttattgtaagttcttagatcaaagaggttctttaaaggtttttctagagtagggttctctagagggaagaacagagtagtgttctctggttcttggtcattagaagtctatagggtttagatttctgtttctttatctaggtttgataaaggtgatcggttgtaaaagcttgtaaagaatagagtttgatttagtggaactctaacctagtgttggttggaagaaactggatgtagtttctcttgttgagaggtgaaccattataagttattgtgttgattgctttcttttaatctcttctagctatcttaatctgcgattcttttggtgaaatattttattactcaacaagtgaagtttttagtaattgtattattgaactgagtggtttgattgattgaagcattcttattgtgataaagatcctaaatatgttgcttgttttaaaagaatttttaaaaaactttgttttaaccaattcaccccctcttggttattttgtgtattcatcattgttttcacttcttcttcttcacttgaagagctagttgagccacttgaagactcattctctatgcctccatcctcaagcaaaatcattattctcttgttgggacattgtgaagcaatgtgccctttgccaaggcacttaaagcacttgattttgttggagtaaggtccataatttttttgcttgagatctccaccttttcttctttaattttcacttgagaaacctccctcctaggcttgtccttccagctggaagttccagccccaatggttttggaatatttcctccttttaagttgttgctccaccctttgagctttgtggactagctcctcaattgtgccataggaatatagctccaacacatcttaaatttccctattcaagccatgaaggaaccttgccatggttgcctcttggatctccacaattttagccctcattatcatcaattccatctccttatagtagtcatcaacactcttgtacccttggaataatctttggagcttgttgtggacttcccttaagtaataagcgggaacaaatctttctctcaagtacccttcaagtcattccagcaatttattcttggccttctcaacctccctatgtcaatttgaatttggttccaccacaccaaagcatagccaccaaattatagagttgctagaatcacattcttcttttcatcaaagtgttggcatgagaaaatttgctctattttgatctcccactcaaagtaaatttctggatcataagtgccaaggaactttggaattttaattttcactccactcaatcctccattcctcccttctctttcatctctcctaaacctccaatcttcctcctctctattttgtctcctattgttgttttctctatactcctccctctcatttccctcctcttcataatttcctccatgagaggatgcatattcactcatcctcctatcctcataagccccttcattcacacttccaattggattactcctttgtgtctccctttgtgtaacaccccataggcctccgacgtgttatcattaataatatcagattatcgtataaatataaaataaactttcagcggaagcacataatcgcatttcttgatacattatgtatggaataaccaatatctcaagtcacatatacacaaaaccataatgcacgcccctgctgatccattgttcacaaatcaatcataataaagacagataacaaggttcttaggcagagtaataaatatacaacacatacactcaaggaaagtgttatatacatatcatcaaaggtctgtacaatatatacatctcagtttcacaccacaccatggtgctacaaaataatatcaaccctcagcagaggtgtacaaaactatacatcatacacaaaataaactatggagccttcatgctctctatgctgctcctcagccaagcagtctagtctctgatgggcctcttgccctgagactgctcttctcttctagagggttcacctgaaaccacataaaccccacacggggtgagataacatatctcattaagctcaggatccatggaggaatctcttccatcctggcccactatcataatacacacaaacaagtatcacagttaaatggctcactggcctagccctcttgcttttcataacaacacaacatatcatacaaaagtggctaacatatcagagtaggaggaatagccatctcctggaataatgccacggaataggaggaattgccatctcccatatcagtacctctagacaggaggaattgccatctcctgtatcaatatcacagaataggaggaattgccgtctcctataataggaggaatagtcgtctcctagtgtgaggccagaactcacacctatgtcatcccattgggtgctacccctttgcatggatgcacaacatatggtacctccgagaatagaaggaatagccgtctcctattcccttggcctaggggatcatcatcaccccgggatcatcatcacccaagagccagccatactaggaggaatcgccatctcctagggaggtccatatctatctattggccaatagatctatctcaaacacaatcatatcacagcacagcacaattcaagctcagtgtaacaccccgtaggcctccgacgtgttatcattaacaatatcagattagcgtataaaaatatcaatttaatcaattcagcggaaacataggatcgttttcttgatacattatgtatggaatcacacaacagaaccataaaatcacgcccctgctgatccagtttatcaaagcctaatataataagacagatgacagatctttaggcagactaacaacaaaacaacatacatatgtactcaggaagtatcatatacatatcataaatagttctgtacaaatatacatccatgtccacaccacacagatcgtggtgatacaaaagaatatcagccctccatgagggtatacagaactataccacaaaactaatcaaaatagagccttcccgctctctatactgctcctcagataagcagcctagtctcaactgggcctcctgccctgagactgatcttctcttccagacacatcacctgaaaacatataagccccacacggggtgagataatatatctcagtaagctcaaggtccctgggaactcgttcccaccctggctcacagattcacaacacacccatatcagtcaaacatatcatatatggccaactggcctggccctctggcctcatcatatcaaatcaacagcataatatcatcacatgacaggtggcagagctcctcaatgcctggcggagctcctctacgcccggacggagctcctcaacgtcagtacctgtcataatgtggcagagctcctctatgccacaggcggagctcctcaacgcccagaatacacgacagagctcctcaatgctggtattcatctattggccaacagatatctcaacacaacatgcatatatcaaattcagatacatatcaatccacatacacaatgtcatagtcaatgcatgcagtatgaatcatgaccaccactccccaggagcgtggtgtgcaaccaaaacaggaattcatcccgagagaacactgaacttacctggtaaggtctcagtcagcaattccttcccaggtctgtgactcccgctaccaacagtcacagaatcaatgcctaaccaaggcataagtgatttcacatcaaaaccagaccacagacatgaaattcacaatatctatatatatatatatatatatatatatatatatcatacaaaaatcccctatcctaaggttcaagccatctcagcctacatcaggctgttctaagaccactcaaggtccatcaggatgggacacaatccatctgagtcattctagactcgctacacacgtatatatatcgaagctttactcagcttcacaatacaattgttatcagaaagggctaagatccattcaaagccctgctctacaagcctctcagctcagagcatcacagtcaaggctctagcctatcagagacccatcgacaagtgactctacataagttacacaggcatatacagagccaagattcaaagttatcagaatcaaaaactgaaagctaatccttcatctattctaagccctgaacaactttctcaactggatcctgggctaattctagtcccagctcatatgggtcactattcacagaggcccccagaatcaaaatcaaacggtgaaatctaagtttcttacctcagtggcgcacccaacagcctcagaacagcttctccaagcttccacgttccaattacgctgtggttttacgccaagctcgagttctctgagcttttccctctgaggttcctcttctcactcaagctggggttttcacggaatttgatgaaggattcaagctttctaatcggttcaataaagattctaaggctcagggaagtgtttaggctgagaaatcaagtcctaggaagctcaaggacttcaacaatggaggttggctcaagggaggaagatgaaatggaatttttcccattttctcacgttttggcctttaaaaactggtctgccgacgttcccacgcgactcacttgacctcccacgcgtttcacttgagatggcagacagaaatgccctttctgagccacttcccacgcgactcgcgtcgtttcccacgcgactcgcgccatacattcgggccttccacgcgacacgcgtggatcccacgtgactcgcgtggagcctcagagaaaaccatgttttctggaccacttgccacgcgactcgcgtggatcgtcaagtgactcgcgtgacatggcagagtcatctgccctatattacacatatggcgcgcgtcgcgccgcaccccaagtgagtcgcgccatatgccagaaccaccataaaacttgcattttagcctcttcccacagggttctaaggcatactcatataccttaacccttaaaattagattcatgcttaatctaagcttaaacatacgcttatgaattcaagttattacatatggtgccatcagtgccaatcctggcgccaccggtgccgcacccttagcagggttttctgacctgaatccccgcgcgttaagcgccgaaaataaaagtccttacactcagaggcatatataaatcatcacaagaatgcagatatccaagcatgcattatgaaatgaccacaactccccctggagtgtggtgtggcacacaagatgggaatcatccccagggacactgaacttacctggaataatatcactctgtggtctggtccctgctctgtggctcccgccaccaataatctcataatcatggcctattcaaggcacatacagtttcatatcaatatcaagaccacaggcattaatcacagatcaaacatatcagaattcccctatcctagggttcaaatcaagtctagcccatcattaggcttctctcagaccacccaaggtccacatgactgcctatcaatcaattgagtcctcacagactcaatgcagtctcatgctcaaatatcattggaatggcctcagtctcaaccaaggccctattccattagcctcttaggcttttacaacctatacaaggctctggcatatcagatgaccaattcaagtgacaataacaccggccacataggtaacacagagccaaaattcaaagtcatcaaaatcaaaaactgaaagttgttccttcatccattcctcgtcctaaacaagtttctctactagaccctgggctaattctagccccatctcagtgtgggtcacaaaactcagaaaaccccaaattcacagagaaccaagagaactcgaatttcttacctcagaagcgactaaggagacctcaggacagctacctcgagctctggtgttcgtctcccaccttaagtctcgaccacttctcaagttctctgaggtttctcacttgagaattcaaactctcactcaaatggggtttaaaatgaaaggatgaaggattatagctttctaaaggtttctctcactatcaaaggtcacaggaaggtgtttagaactcaaaacaaggtcctaggaagcttggcaagtcatcaatggaggtcctggacgttgggaggaagaataagaggtttttcctcttccaaaacgcgttttgcccttaaatagtcagcctgcccgaggtctggcgcgatccgcgccacaatggcggtgccccggcgctaacagcgccagccctcatgccatccgcgccaacttcccaagacctgtggcgccacccgcgccacctctagcgccatccgcgtgaaattccagagaaaattgattttccagggcacttctggcgctatcagcgtggcccttggcgctacccgcgccaattctaaaacaaatggcgctatccgcgccaaccttggcactggccgcgtggaaatccagagaaaatggatgttccaggccacttcccgcgctaatcgcgcgacctctgacgcgacccgcgccagttggaaacctcggcgcccttggcgccaccttgacgctcccagcgtcagcttccagtgggtctggcacgatcagcaccagccctggcgccatccgcgcggcacccttaacagagttttctcatgtgaatccccgcgcgacaacgcggggttaggctccaagaatgagggtccttacactttgtaacgcctcaaatcttgcctccattttggtttgtaattcctccatttgttttgtaatgatcttcatcatcctagaggtcttaggtgacaaagcttcttctccccttgagctcattcttcaaaagaaatcgttagcaaaaatacaagtatatagaaaaattatcacaactttaagtgtttgccattcacactcttgtttgcacactttatctaggctttttctctaaagttctctcttgccttttcccactcttgtttcactatagctcttaagcaaaaactcccaatccaacaaggttctttactaaagtgaaataattctaggctagactcaagaatccaaaaacaagaaaactctaagacaaaaccttggaatttttaaaagacaagcaataaaagcaaaaaatttaaggatagcacaatctcaaattgaaattcaatgagacaactaaaggatagttgctgaaccacaactgcacaaggagatacactaagcaaattcaagttttagaagccaaatttcacaaaatttacatgtcatacaagttcactcaattttgtggttcaaagaaaatttgaacttctaacttttgtaacctttctttgcttctagacttctgtttttattctatttttccaaccaccaattcaatattttctttagttgcacctaattgcttttcttttgctcttttgttcgtgtttctttcacaacattctttataggcttttgttttgcatttgtataagttcaaaaatactaaaagaaatgtgatgaatcacgaaaaacaatgtataacaattgtaaaatttctttctaacaactcaattcagatttagacatgagattagaatcaaaataagaggttatacaacacacaaaaaactactaacacaagctggcaagaatcaaaactagaaaattatcaagcacaaggaagaacatgaagaacatgggatgaacaagaatttctaaaactagaaactaatcacagggaaaggtgtaggagcacaagacaacactcaatccacgaagacgttaaagaaaatttaagaaaaccagaagtagatctaagaatttagtcatttttgtttttacctttagggtagttctaaaaactgaaattgaagaagaatttctcaatgattaggctctagataccacatgatgtatgtctaagctcattagacattgattttcccaatctaccttgcaatgaaactcactcttcaagaacttgagctctcactcaagatgtgaagaaaaaattgaaaataataggaatacccacaataaacaagaagggggtgaattggtttaaacttgatcttttaaaatttatttataaaatcatagttaaaggatcttaatcacttttaaaccaagaatgcttttactcaatcaaattactcagctcaagaaaccaatagctcaaaatagaacttgttgaataatgataataacaccaagaacaagtgaacaagatgaattttagaaatagaggtaaagaaaatcaacacaagcaatttatactgattcacttctcaagagaagctacatccagtttcttataatcaacactagattaaagttccactattataaatttttgttcttacaagctttacaacaaactctctttatcaacactagataaagaatagaaatttaaaaccctattagacttctaatgatcaagaactagagaacactactctgttctttcctagagaacactactttagcccaagcttcaagaacccatttacaatagcatcaaataatagaaattacaaaaacaaaattacaatcaaagattatggagagaaacgacctgatgatccaatgaatgtgaatgcatatgaattaccaatcaaggttgaatagcagaaaacagagtttcagaacatgctctccattaaacccttgaagtttcttgcccaaaaatcattcaatacccatgaagattaaagagttggacaagaagttagtaaacccagaaaatcacttttaaactcttagaaggcttgtgtatactcaaaaaatacgaagtcttcaagttcaaaaaacaagtcaagccttccttctatttataacaaaattttgtaacaacctgtatcgattacatgtgccaaataatcaattaaaatgcatatgtaatcgattaaaccagttttaaacatgaactgaataatcgattaatttcctatgtaatcgattaaaacagtgaaattaaatttttccaaaaacattactcaattaaatcttttttttttcaatttgtgagtagctttaatgttttaatgaaaaacatttaagcatgttaatgagtatgtgcatgcaatgcaaggatcaaaagattggcttctcctacacttcatttgaattacaatcttcaaggcatgtgaaaacctcaaaacattcttctaagtcatatgtttcattcttcatgttgctccccctatatccaacaatctccccctttttggctttgaacatgccaaatctttgattgaccatgtgtttgattttgaagtgctttgagggatgaaaatagaagactttgaactttgtaaacctgaaaacaaatcagcctctttgccaacaacaagtgttaagagatatgcttgcataaacattaatcattaacttgcattagttgcttccttagacttaatttgctcaatttgctcccccttagataatttattagtttttcatttgtgcaaaactcagcaaaaaaacagagcacaacaaagtatgatatcaatcaatatttctccccctatttggcttatcaaagacaaaaactagcacaacaaataatgagaaggagaaaaataaagacttcattaatcaataagggaggtacagtacattaatcagaaaaacagaaaagaaagcagatgaaaaacaagaggaaatacaacaaactttaaagaaattataaagaaaacatagacatcctaaaaggattcataaccatcatagataagcttagactctatgttttctagcctagattttatctcctcttagactaaatttgtctcagccatgtgctcatgatgtagggacagtaagccatccatcttttgaatcataagagattcaaatggactgtaagatggttgagcagggccttcttcttcagcctcttcatcagcttcttcttcatttccaacagcagcagcgatttgttggccagccattttccatccttgaggggttttgaccatccctagctttgtgagatgtttctctttaatgaggctgttgcttgagtttgtgttgtcaacaacctcattagagacatctatattaaaataatcaataaacctggaaacaagaacaacatatggaaaagggtaattcattaacctcttggacttaagcattatttcctcaagaataagaatccaattcatcttaattgaatttttaagaccgtacacaagttgcaggtcatcatcagtggcttgggcatgattggtggctcttggggtaaggatgtaggtgattatgtagtggataagtctgtcttcatgggtcattgggccaatgcttagcctaagcttcagcctcatttggggatcaagaagcatccccctataggtttcaaccttattatatcccccagcctcttcttcaaatttcctttccccttcaaaggaaattccaacaactgcttccaatggctactccattcacttgggacagaagggtcccatctatagaacccttagcacaagtgtagaacatctttactaattcagggtaaaaggtacccttcatctcaaaaaactttctcaatccttgagtttcaagaaaagcagggaattgaaaaccttacctaatgaaccaatcaagttcaaggtgtttgggaggactgacaaatttggtggcattgaactgaagataagtcattttgtccctctcagcaggaaaccaatgatctaacctattaccagcagggttagaggtttcaccagcctttcttttggaggttttgactctcttagatgttgacatggataaaggttgatgagagactatctgggcagagtttctaaacttagagggaagaagatgagaatggtgtgatttcttccttcaaccaaggctgtatttataaaagattttgggctccaaagtttcaaaatttgaaatgaggaacaattattacgaattaacccactaacattaaagcacagaagactcaaatttgaattaggtggtagttgggcagttacaatttccaagaaaatctggcagattctgcggtaactccatgaataattgattatatgctaatgtaatcgattaattcgtcatgtaatcgattatttcagtgaaatccagttattgaagatgaagtgtaatcgattgtttcttttatgtaatcgattattatagtgagatttgaaatataaaataagtttgaagcttgtgtaatcgattaattcgattcgtaatcgattattccagaaggatttgaatttttgaaacagtttctcaaacaatttaatcaattaccattcactgtaatcgattattccagtgaatttaaattttgtaaaagaatttttatactgtgtaatcgattaatccgtcgcttaatcaattattacagataaattcattttctggaattatttttctatgaagaataatcgattattttgcttgtgtaatgtattacatatgcaaaaattttattctaagccatgtttcaagttcatttaatcgattaatttatgctctaatcgattattacagtgaaaatatcagaatgaacagtttttatgcagcacaacttggaatttggagccacatgtgatgattgaacaagtataaagctatttcacatagataagcacataacaatcatgctaataaagatttgactcatccaagatacctagcatgtttctaagagtatagaatctatctctagccaaaggtttagtgaatatatcagtcaattgattgttagtatcaatgaagtcaattttgatattacctttttggatgtgatatctaaggaaatgatgtcttatctcaatgtgtttggtccttgagtgcattattggatacttggaaatgttcatagcacttgtgttgtcacatagcagaggtatttcttttaattctacactaaaatcttgtaattgttgctttagccataggctttgagcacaacaacttccagcagagatatattcagcttcagttgttgataaagcaacacaagattgtttcttgcaatgccatgagatcaatgaacttcttagtagatgacaagttccactagcgctttttctatccaacttgcatcctacaaagttagaatcagaataaccaactatattaattgatgcacctttaggataccaaagaccaacttttggtgttgacttgagatatttgaggattcttttgactgcaatgaggtgtgattctttaggatttgcttgatatcttacacacaagcatacactcagcataatatttggcctactagttgttaaatacaataaggatccaatcattcctctaaattttgactcatcaaccttttttcctttttcatctgaatcaagatagcttgatgttgccattggagttgcagcatctttgcttttctccatttcaaactttttgatcacttcaaggcaatacttggcttgttttagaaatgttccattcttcatgtgattcacatgaagtccaagaaagaatgttaattctcccatcattgatatttcaaactcattttgcatagagatagaaaattctttgcacaacaattgattagttggaccaaagattatatcatcaacatatacttgaaccaataagatatcattcttttgtcttttgatgaacaaggttttatcaacatgtcctcttatgaaagatagttcaagcagaaatttacttaatctttcataccaagatcttggagcttgtttttaaccataaagagcctttttaagtttaaaaacatggtttggatatttgaaatcaacaaaaccaggaggttgctccatatatatatcctcctcctcaatatatccatttaagaaagcacttttaacatccatttgaaaaagtttaaaattcattaaacatgcatatgcaagcaataacctaatggcttccaatcttgcaactggagcataggtttcctcatagtcaatgccttcttcttggttgtaaccttttgcaaccaatctagatttgtttctgactatgattccactctcatcaagtttgtttctaaaaacccatttagtgccaataggtttgagagaagaagatctaggaacaagttcccaaacttcatttctcttaaactgtttcaattcatcatgcatccaatgttcatcaattaaggcttgatcaatattcttatgttctatttgtgaaacaaaagccatattacaatagagatttcttaataaagatctagtagatactccctttgagacttcaccaatgatattgtcaagggagagatctcttgtagttctccaatcttttggctcttggactggtgttgattgttttgctttagacttggttcttctttttctttatccattgaatcattaagctggatgaactcctccaaaggacctgcatctacatcacatttcttttcctccttggagggattagattcatcacaaataacatgtacggattcttccatgcaaaaggttcttttattgaaaaatttgtatgctttactatgtaatgaatatccaaggaaaatgtcttcatcaactttagcatcaaattttccaagtgattatttaccattatttaaaacaaaacacttgcagccaaatgctctcaaataagaaatgtttggttttctacctttgtatagttcataaggagttttcttcaaaataggcctttttattaatctattcaagctgtagcaaactatacttactgcatcagcccaaaaatattcaggcatattcgtctcattaagaagaattcttgcaccttcttcaagggatctatttttcctctccacaacaccattttgttgaggtgttattggagctgaaaaattgtggttaattccattttcttcacagaaattttcaaaatgctcattttgtaattccccaccatgatcacttcttattgagataattttgcttcccttttcattttgagcaagtttggccaattttttaaaagcattgaaagctcactcttggatttcaaaaacaaagtccatgtgaatctagagtaatcatctacaatgacaagcccatagtaattacctcctaaactcagttctaaaaggatcaaatagatctatgtgaagtaattcaaggggtcttgaagtagaaacaacatttttactttaaaaaggattttttgtttgtttccccttttgacaagcatcacataatttgtccttttcaaacttgagtttgggtaagccaatgactaaatcctttttaattagcttgttcacatgttgcatgttaatgtgacttgcccttctatgtcatagccaagattcatcaattttacttattaagcaagaagtgttgtgaaagaatgcatgatctatggagagtaaatagatattaccttttcttttacctatatgaatcacctcaccattttgcccgtcacatatcatgcaacaattgtcattgaatgacactttgaaccctttatcacaaagttggcttatacttaagagattgtgctttaaaccttccacataaagaacacttctgattttggttttgaagttgtctcctatattgccttctccaatgatcttccctttgttgttgtctccataggtgacaaatccaccatcttcaagagtcaaatttgtgagcattgatatgtcaccagtcatatgtctagagcatccactatcaagataccataatgaagatcttgctattagacatacctgcaaaatccaaatcaatttacagaggaaggtacccaattgagattgggtccataagggttagctactttcttcttcttttgcacccaaatataatctccattaggcacatagaatctcctagcatagcatttataagatgcatgtcctttcatcatacaatagttgcatgttacagattttgatgaattcctcaagtaagcattttgattgatatttgagttattgaaattcttttgatttttctgttttggtggtacaaatatagtttttccaaaagactttgagccttgtttgtaaccccaaccagaagtatctccagcatatttctgcacactcaatatttcagccaagttgcatttacctttgtaaagctttctcaaaagatcaatcaaatcactattcttggataagagtaacatgtatttttctccttgacttcttttgtaattttcaaaatccttttgcaccatattatatttgtcaacattaaatgaagaagaagcacatacacattcattcattttgtaacttgaaacaagtttttcattttctcctttcaagttgcaaatttcagtttgcaattctgtaatttttgcaacatgccattctaagatttccttttagcttattattggattttgcaagcttttgggcttcttcatgcatttcttgaaaagcatcaataacttgatcaaattcagaacttacctcagttccaacaattgagagatcatcatcttcattaattgtggaagtgagacacatatttgcttcttcattttcaattgatgattcagaagttgttgactcattatcttcccaggctatataggctttcttagactttccttctttcttcatcttattttcaccttgttgctttttcaaaaagatgaagcattcagatttgatgttgttagaattgaagaagctgaggcaaaggattcaagatgattgaagcaaatgagttttgatgttttacatgcccaatcaatttgatggcatatataatttttgtttaagcttggttcattagataaagctttataattctcattagcttttgataatacatgcattcattcattcatttgaatagaattaatcatgtggtaataatcaaagtcatagaaattcattaaggcaattaggaattgtataaaacattttctcactgttttaatcgattacattggtgaaataatcgattacatgtgtatgttttttggaaaatgccttatgaacatttttaatcgattaccattggttcataatcaattaaataagctttacacagaattagaaactttctgtgataatcgattatcttgagaaataatcgattacataagcttctgcataattttacacagcatgttcatctggtttaatcaattatcagatgattgtaatcgattaaatatgcattgttatgttttaggcatggtctgtgttaatcgattaaataggaacttaatcgattacatctgtgcattgaaaaactaagttcatctggattaatcgattacaagatgacttgatcgattattttgttcgtgacaaatttccagatttctgatgaacactttaatcgattatttgattaaaataatcgattacaatagttaaaataatcggttacagttagttaaaacattttttttaataaatagaacagctgggtctgtgttagactaagtgagacgaattcgagtggatcccaggtgagttcttaataattctaatcttttttttcatataaacgactactttttccgatgtttcaaaaaactccatttcagaaaaatagagatacttgtgcaagccttgtgatagacacattctaaagctctcaagagtacccaaggctgagattagtgagataatcaaatatgatgagtatcatggagagttacttgtgtttttagtgttgtttctctgagattgaagaattgttcatgctagtgcttaaagaaagccatcaagaaatagttatattcatctgttgcatataatctcaggttgattgcatcattcatatcattgtaaattgctgaggattataaggtgatatctttcttgaacataaagcttgattttggttgatatttgttttgtaattgtgttgtatttccatataacatttgtattctttaaagctttttctagaaaggatttctagagggaagaatatagaggggatctctggttcttgatcttttgaaaagtctataaggagtagattttgaattttacctagggagggtaagagaaatcatttgtaagcttgtaaagaacaaatatttgttatagtggaactctaaccaagatttggttggaagaaaactggatgtagcctccagggttgagaagtgaactagtataaatcttacgtgttttaagatttcagtttatatttcattaaattcttgaagtatagaatttgttcatcatacaaacttggttatagcacaagagtgatttgataggtgaagtaaattgttttctaaattggttttgaatagatacgatccttttgaagtcttccactgttataaattttgaaaggaaattttaaaactctgaggtaaaaccaattcaccccccttcttggtttatttgcataagtgttcattgtattttcagatgtggccaggttttccacattcaaagcaagtgaagttgttgtcactccttttgttgttgttgttgttgttgttgttgttattctttgtgaactttttgttcttgtttcttctcaagaacttgctgaattttttaacaattaaattcatgttgtcctcttcatcttcttcacttgagttttccactttttcaacctttgaggatgcagctttcaaagctatgcttttgtgtttcttctctgcatcttctacattggttagttgtgacatttcgagttcatacacaagaagcttaccaaatagtgcagccatagacattttggatagatcttttgattctttaattgctgtcacctttggttgccatggtcttgtgagacacttcaagattttgatgtttaactcttcagcatcaaagatctttccaagaccaagaagatgattaactatatgagtgaatcttgtttgaagctgagatatgcttttattggtgttcatcttgaacatttcatactcatggattaaggcatgttttcttgatcttcttacttcatatgtaccttcatgagttatctccagcatttcccacatcttctttgcacttaggcaccttacagttctaaagaattcatcagaggaaagtgcagaagtaatcatattcttagctttaaaatcatattggacaactctcttttcagcatctatcatttcatcccattctttgggaatcatatcattaccaacattttttataggaatcacgggacctttctctatagcattccaagtacctgggtcatttgattgaataaagattttcattctatttttccaaaaactgaagtgctccccttcaaacatcagaggacgattgagggaggcaccttccttgaaggtaatttgtgtagtattcattttctttttacagaaagatagtgatcttgaataacactcaagaaccggctctgataccaattgaaaataataggaatacccacaataaccaagaagggggtgaattggtttaaacttgatcttttaaaatttatttataaaatcatagttaaaggatcttaatcacttttaaaccaagaatgtttttactcaatcaaattactcagctcaagaaaccaatagctcaaaatagaacttgttgaataatcataataacaccaagaacaagtgaacaagatgagttgtagaaatagaggtaaagaaaatcaacacaagcaatttatactggttcacttctcaagagaagctacatccagtttcttaaaatcaacactagattaaagctcctctattataaatttcagttcttacaagctttacaacaaactctctttattagcactagataaagaatagatatctaaaaccctattagacttctaatgatcaagaaccagagaacactactttgttctttcctagagaacactactttagcccaagcttcaagaacccatttacaatagcatcaaatcacaaaaattacaaaaacgaaattacaatgaaagattatggaagaaacaacctaatgatccaatgaatgtgaatgcatatgaattaccaatcaaggttgaatagcagaaaacacagagtttcagaacatgctctccattaaactcttgaagtttcttgcccaaaaatcattcaatacctatgaagattaaagagttggacaagaagttagtaaacctagaaaatcacttttaaactcttagaaggcttgtgtatactcaaaaaatacgaagtgttcaagtttaaaaaaaaaagtcaagccttgtatctatttataacagaattttgtaacaacctgtaatcgattacacgtgccaaataatcaattaaaatgcatatgtaatcgattaaattgtcacttaatcgattaaagtgttcaaggcacattctgggtttcaacaacgaacaaaataatcgattagtccgagttgtaatcaattaaatcagaaaaatgttgtttcagaaaacagcttgtgtaatagattacaaatatcagtaatcgattaaagcagcaaagcaagcatttttcaaaatatcctatgtaatcgattacgagtaatggtaatcgattatcacagcaaggaacaaaacccattttacactatgtaatcgattacaagaaatgagtaatcgattaaagtgttcaccaaagctttccagtttcaaatacgaaccaaataatcgattaatacgttgtgtaatcaattataatgttcattaaagcttttccagttttaaacatgaactgaataatcgattaatctgctatgtaatcgattaaaatagtgaaattacatttttccaaaaacattactcaattaaatctttttttcaatttgtgagtagctttgatgttttaatgaaaaacatttaagcatgttaatgagtatgtgcatgcaaaatgcaaggatcaaaagattggcttctcctacacttcatttgaattacaatcttcaaggcatgtgaaaaccttaaaactttctcctaagtcatgggcttcattcttcatgttgcttcccctatatccaacaaaaatggcgtgaagtagctccaaggaattcaacaatggaagatggactaacaaggaatgaagatggatgacgccatggagaagctctccaatgagtctaggaagaatcaccataatagcattgagaagtcattgataagatccaagaagttcttgcacaagaacaagagagaaactcttacaggaaagtttagctttcttattcatttagccaaaagtctgtacaatatgtttgggctagccttatatagccacaaaaatgtaagctaaatgcaagtgaaatggaaaatgaaataaagcttgaggtgcaagctatggaagattgaggtgcaagctaatgaagcttgtggtgcaagctaataaagcttgaggtgcaagcttctcatatgatgactcaccacttgccaatgtcagccatgtgcattttacaagcttacataggtgctaaaaaaattacatacaagtgcacctacacttatttacataattgtctctaaaggcctttttatttccactaaaagcctatttattgccactactattgccactaaaaggtgatgaaattaaattcaacttgagagtacaaaatccaatccgtgttcttcttaagttggtgtgcttcttcatacttgtctaaaaggtgcaagttagctttgatgtactcttgaagggattgagttctagctcttgtcatgggtcctctaaagctaaccaaagaaagttattcaattcttggccttgagcttgcgatggacctccatcaccttctcatgagttccaatacctctttctccttaggcacttcattcatcacattcttatgcaaattcatactagtttccatagacatgtcaccctctcgtacatgttgaagaagtttatctacaaaggacataaaggatctcttcatataaacctttgtaccttccttaatcttctttgtacttctatatgaagaagatcctcctattgacttgttgcctctaaaactcttattttggaaaccctagcagagctcaccagcacatgacatatattattgagaatgaaaagagaaacaataacaagtaattatcacaacttgtttagaattcaacaacaattaatgaaagaaatgaatggaaaaatataacacaaaggataacaaagttcagcaacgtgcttattctataatcaccaagagaataatgatgtattgcaccggttgtatgctgatcggctcaagacttccatcatatagccccttatctaccgatttttgtccatcccataggtctcacattcatcctttaatggtcgatttttggacaacccacccccacaccagtaatgatcacctttataacccccatagcatggcaataattacctagggaaaatcgtgacaagatatccataatagtgatttatgaggaattaagggtgaaagtaaccgttgctaggttaagaaatgaggctgggtatataagaaccctaagcttgatctaagaaggcatattacatttatctcagttgaatgctcttgggctaggtcttgtaaaccctaggtgagactttgttacaggaacagagggataaatgaaatctaaacaaaaggagaaaaaagtagaaaagtaaaaaaaaaatcaacaattgatatagaaaaccaataaatctaacagacaaaatttctttcctatagttaggactcccacgtttcccaatttaatcatcgacaagtatcaaaatatgaagactaatctatattgttgatctttcacaataattttattcagttccttggcaataattagttattagttgttttacacttaaaaggatggattacttgaaagttgtttacaactagggtgtaaacgaaagtcaaaccttagaaatttaggcttgatttgtaaaaaaaaaaataagtgaaacaactaaaatttatattaatctaactaaagcttaggtttgacttattataaaaaaaaaaaactaaaaaatgagttttacttgtttaacacatgtatcatttatcatttttttattttgtgaaaatttaccttaaactttcttttaaatctatcaatttttgtattttaaaaaaaattgaatactctataataatctataaggataattatgttatgtccctaattattttttttccaaaattaacttttaatccctaaacaattgttttccatttgtgacccctataccttttctttatcaccattttagtcttttctattaaataatagtgttaattaatgatgtaacaatcactttgacaacctaataacttgtcatgtcatcaaaacattaatttgacacaacagtcacaagtaatttatttttgtgaactatatatatatatatatatatatttaatttctaatttgttcagtccaattgataacatctaattagtgttgaccagtaaaccaaatttaaaatacagttttataaaaagaagtcgtgtatcaaactccttaataataatgtgaaaaatcactaaattgtaatattatcagttaacattattagttgacaacaaaaattaattaaaactatcaacacagagaaacccaaatgtacttcttgtctatgcatatccatatctaatcttaccgttgaattccagcccttccattgaacaaaacatggagcactcagatacacctcacataatagctataccctttccatcaaaaggacacatcaaacccatgtttaatttagccaaacttctttcccatagaggccacaaaataaacttcatgaaaacacatcacaaccacaatcgcctcctccaattcacaaatttaccctcattccacactcaattccccgatttccactttgcatccataactgatggcataccctctgaccatccacaaaaaagtgccctaataaactaccttccaatgcttatcactcctagcgctaggtccttagttgccaaagagttctgagaattattctcaagacttctcgaggaaaatggtgatcagtggcagcaaccatcctgcatcatagctgatggattcatgtcaatgattgtcatggaagttgcacaagagtttatgattccagtgattgatttttgaacctacagtgccacttgcacttaggtcacaatcctcatgagtaaacctgctcagaaaggagcacaactgcttcgaagtaatcaaggtgagtaaggaagtttaatttaaagcttaaatatgttgaaggttcctcttcataaataatgaaattttgttttcagttattaataactttttgttattttaataagtcctaaatatattaaaatttttcttttgaatctctatcatcattgtgtgtcattttacaaattaatcttccaaatatcattaaaagttgttatggtaccatgtcattaaataactaacaaaaaagacttaaaacaacaaaaaaaatatcaaaaaatcttaaatatatttaagccttaatttaatcatcaattataaacatagaaacagactaataaaattacatgaattcaaacacaaaagttacacacgaatggtaaaaataaaaaaactaaaatgatgtgaagttttaaaaaggtcatgaaactcttttagtcacaattttaaatcttggtccatgtatagtatacagtctctgattattatttagtctgagatattacgttctaattaatgaaaattagaatgctagaacaatactcttatcaagttttgacaattttacaattgacttaagatgcagaaaatttgaaaagtgcatccacaaacattccaggattagagaatttattgagaaactgtgaccttccatcctatttcacaatattattgacaaatgaaagcctcaatattatgggcgtaggactgcagatagttcaaagtgaaggaggaacttggagtcttcaaggacacattacactcctatggctataggtgacaaaattcatgaagacaaggatggtaagagtgtagatgttactatgtatagaggtatgatagcctctttattgtacttgattgcaagtaggcctgatatagtttttagtgtaggattatgtgctatatttcaaagtaatccaaaagaatcccaactaaaagcttaaaaaagatcctaagatatttaaaagagacaagtgatttgagcttatggtatcctagaggagctaactttgatttgtttgcttttagtaatgctgactttgcatgtgacttagttggtaggaaaagcacttctgggatggcgcaatttctcagttcatgtttagtgtcattggaatctaaaaagcagaactcaatggctttatccacaattgaagtagagtatgtagtagcagctttgtgttgcacacaactattgggggacaggcaacaaatttttgactttgacattaatatacgttgtatgcctattttctatgataatactagtgccatttgcaattctaaagatcctatgatgcattctatgaccaagcatattcatatcagacatcaatttcttagagattgtgcagaaactagtttaatcgaacttaagttctgtgatactaaacatcatgttgctgatattttcactaaacccctaagccgtgagagatttgaaaaattaagactggagctagggttgataaatcacaactaatatgttcaaatttcttttccccaatgattaactagtttagaaaagaatgaacattcatgatatttgttggactatcttgtttctctcactcacctatatctgttacatcgttcacttcatatactttcttgttttaataattctgaagtacatgccttgatattgtagtgaatttgctatgttgtgaggaataatgtgcatgtgtgttttctctgtgaggtaggtaatctagaacttgtatgattgaagctcaaggctcattgtttgagatgtttcataagtttactgaaaatgatataggccatgtttggtcgtttgagcctttctagctaaccatttcaatattttatatccctagtcaccctatttgagtcttaattctgattattattgataaattacaatatgcaaacctttgtgtttttattaaaaaatcccttttaggtgcgggtatgcatagtttctaaagcaagtgtcatgaggtgtctggttgaaaaagaaaaagaaaaaaggggaacgacaatggaaagaaaaagaaaagaaaaatcatcttgattcaaaaaaataaaaataaaaaaagagaaaagaaaaaggaagtggaagcattcatcttgattaaaaaaaaacatgttaaaagtattaaagtggagaggaaagtaggagactatgcatatcagtactatagttatttaaaaaaaaggagaaaagaaaaaggaagttgaagtattcatcttgatttttaaaaaaaaaggagaaaagaaaaaggatgttgaagcagtcatcttgattaaaaaaacatgttgaaagtattaaagtggagaggaaagtagaaaactatgcatatcagtactatacttatttgtttcctatctcaccttattctttgtttgtttcttatccaccttgtaagctacaagcttataaagacctattgatttggtggcttatgaaaaattttcacactaagagtggagagcagtcatgatatacaagcttatggaaagtctgaagaataagaacatagagtgatcctaaatatgagtaaaaaggcaatttattgcaatgttaaggcatgtgctttagattgtaaatttctttgcatcctttcatctttatcactttcttgttcttcattgatagctctattcatgttgctcttcccatgtatccctattcctgctaaggttcataaccattctctctatcatgattttttgttttaatcttttcgatgatgccaaaagggggaaagaagtttgaatgtcatcttatggtagattgttgtgagttgttgattctagtcatagcttggcaaggctatggaatagttgaaaatcattagtagataaagttgaatatcattcattcatagtgcattcatagtatatttgttcattcaattagtacatggcattaattatttgtcatcatcaaaaagagggaaattgttgatatttgttgaactcctaatgtataaaaagatttataaagttttgatgataacaaacaatgaatgcgatattattagatttattgcactgatgataattatttgattatttgatattttgaagttactgatattttggattgatgaagatcaacataatttgagaagattatttgaagaattctgaagattgatatcattcaagataacatggaattaagaagatttgtttttatttatttttattaaattttatgtaaggagattagaagattgaatgctttaagattgtattgcataatataatagaatatctttaagattgcattgcataataagataaaaatattttttaagattgcattcaaaaataggatagaatatttttaagattgcattgcataatataatggaatatctttaagattgcattgcataatatgatagaatatctttaggattgcattcaaaaattggttaaaatcatatgcttaaattagtataaatagaaacatattcttgtgtttagagtatgcattccattctagataatattagagttttagagagtttatgtttgtatcattgagagaattgttgtgagatcatatagaaacatttggcaagtatgattcttcaactctccatcaagatttttaaaggtacctatttgcataaggaatagaagcataaaggtaatcattttattgtatttttcttcttgactttggaagaggacacaactaggaaactaggatacaagttctatctctgttcttggtgaattgagacgtgcgactttcggctagaaaactaggattccaatctagctaggaaacaaggatactagtctgtctctatttttggtgaattgagacgagagctttttgctaggaaacaagaatactagttgggataattgttgtgtaagtgtagactaggaaactagaatactaggaactatcatacaccaaattatcatagtggagttttccattgaattgattatccaatttggacgtggtggtttttttacccaaattgagttttccacgttaaaattgattatgtcttctttatctcttatctccatattattgctttgagtttgattttaaattatgaattattttataaaactccatccatccctcttgagttcatttgggaccaacaataagtgttattaataaattaaaaaataatatcataaaataaaaatattcaagaaaatagttaatatataaataatatcattaaatatttaaaatttcacctaagaaataatatcatcaacattatttggaaaattaaacaataagaaaagatagaaaaaaaatgaaaagatgaatagaaaaacttgtatttaatttataaattataattttaattatcacaattgaaaaagtgttttccatgttggttatgtaactcatttcatgacggttcgaaaatcatctttgaagtcgccgtcgtgaaaagtcaaatctttccacgacgattttcaaaaccgtcttagaattttgatttctacattggttctccccgaaacatcttagaatgccttttttgaaaataaaaaaattgaagattctaagacaatgtttactttctaagacggtgtctaaaaagtaaatgttctaagacgatttttctaagaactgtcttagaatcctcaatttttttaattttctttttgtgtaggatatcctatatagactaaaagcctttgcaaccaagaccataagagatggtttaagcacatatagagaaattgacccaacagaaagtggcaaaggtctgtagaaaaatgaagacaatgaacattgaagaagcttcacaacatcacaagttaattaggtcttgtagaggttacctttgcaaatggcttaaatttgactcccaacaaacccttggagaattgtatataaaataaaaaagcaaacacatgcaataaattagagaagagatcacaaaagaactaaacaaataatattttgattctcaagatgactacataaattcttgtagttacatcacaagtagcaaccaagaactatttctctgcttgtaactaagttggcacttagagtaggaactaattgacaacatatgtcaaagactcttcaaaacatggttttaaaataaccaaccacttgctcagaaaggattttggttccaccaagtcttcctcaatatttggtagcttcattggagacaataggaatctattttacagatcacataatatcaagatacttgttattcctttgtctgtcaagatgggattgcaaaggccatttctagtcttttgttttggtttatcaacttaatcccttaaacagaattgagggtttccttttcacattaatttcagccaataaaatattatggcaagtgaagctttaagcttctgggttgaatgattctagtagatatatagtttgcgtgtgataatttgatgatttttttcataagtaaaaaatgcaacatccgaaaatactactatcaactctagtcaatagtactagatcagctcatctaatatgcacttagttgccattgaacattaagaaagcaactatttgtgaatccaaacaagcatcacaaaaaagttttgcccaaattattcaaagatatacctcctttacaagatccccgactattcctctaacaatttcatatagattgttttcagtaaatgattcactaatccaaaaactcatgtccttgtaacaaggaggatactgcaaaggcaaacacaaaaattagaatgttctcacaagattttaggaatgtgtctactcaaataaaaatataaattcctcaagattcaagactcaaaatctagaaggacagtcagacatgcagagaacataacttacaagcttagtcaaattccttctggtgtgagatttacatagaagacaggtatcatttgacaagaataaaactaaaatgcaaaaaatatatctatacctgtatatgctactttaaaataactaactatacaaattattttggtctcaagatgactacataaactcttgtagttacatcacatgtggtaaccaagaaaaagaagagacaacattaaatgatgcttgttgaacgtatccataaaatacctgagaggtaaatcgctcaatttgaccaaaagagacaaatgtcaaatagaaccatagctaacctctccaaccctaggccaaaagcccaagcaaccttattaggttttccatttctcttcagaatctcttgcactgttactccacactccaaaacttccaaccattttccctacaataaaagatatattaaacattacttaaattttattacaaaactattgagtgggaaaaaatagggatgaagagaaataaaacaagcataactagtaatgacataagtagtggggtgatatttgtgacttcttcccctccaaattctagtcacactctcgattactcataaagaacttcctaatcaaaataaatgctaaaccttaagaaaaacacgtcaacctgattagaaatctacaaattttaatcacacgtataaaatagtcaaatatggtgatgataaactattaaatttgaaaggtcaaaatcaatttgggatgaatctagtgcactttaatgaataatttttttatatataatgcgtaatcttcttttcatattattttttaaccatactagtacataacatttgttgtcaccatgctatagagataactatgcatagcataccttgaaatatatttcaagttcaaacaatggattagtaaatgggaaataagtatccacccagcgcatttccacaacacctgaaacagtaaaagggaaaatttataagtacgtaattttgcaaattatatttggcttcaaaggaatatcacaagttcataactagacgccttgtgtatataatttcttgtagaaacaactttggaattttagcatcaaatgagattataatcataaaatatttaatatttccacttttggttgatagagttttactatacctcaagaattttgcaattataattccaattacacaataacttgtagtttaaatatatttttcttttaacctataaaaatttcttgaagtgtaaggagactatttaaaaaaagaaaatcatttacataatgttaggttagagggagatggaggaggctaaactccctccttgctcaattttgcctcccttcaaacttgggaaatgtggaaggaagggaaacttttacgcttattagactaaataaatattaatctaatagctttctttattttaccattctaagtatataatagtaaattttatcatttccctccccttctttgtatcaaatagtgcattaaggaagactacataaattatacacatgtattttgttggaatgttggttgtacacaattttctttttataatgttgggacaactaagttgtaacataaattgcagcctaacacatccaggttgtaatgatctgcctcgtcgcaacggcatcactaactctagtcgtgtgaattttaaattttaatgaaaactctattaatctgattacgaaaatggtagtaagtttttcgcaataatacaatcatcatacacacgctacaaatacaataattgaataatatactaaatcagtactcatcattcacatttttagaacttaatttagttttacatgtatttacaactcaaaatatacatgtctacaaaaaagatgaagggactaactacaaaagagttaattaacaaaacacaactctttccataaagagttccaatgtcatcacgtcggcttggcgtgtaacaccccaaaattttggaatcacagtcaattagtggggtaaaatgttaactagagacagtacagaaggatttaagggaaatgacaaaaatacccttgacattttagtaagatatttgaaggaagaaattttataaatactctgggatgtttgaaaaatgatcagaatactattagggtgacaattacagagtttccctgaacatttttttgaaatgacgattttacccctagggtgaagggtaaaattaccaaaataccctttaggttaaacaaggactagatgaccttagaaatttgtgggaacctgaggatgtgataaaatactcttagacaacaaattatcaacatggttggtgacagagaatcataaactgtgattttcaggaattttgaaaaatatcttgaaaagagctcaatctagacaacctcaggtatcagaaaaattataagaaaagtgtaaacataatctatggagttttctcttaattatgggattaatagactaatttagtaatatggattagtaattttacaaattaaaagtgaaacggaccaataagaattcaaataaagctattacatgaaattaagaaaaaaaaattggttgatgtggaattctaaattaagtcttgaccatatgatgcaaaatcaatggaggaaaacatgtagaaaagtcaagaatggtcacatggatggataaggagcctagctatttcattggtccaagtagaaagtagccataaatgctttaagacttttacaaaatgtaaaagtttagtaacaagccaagcaccaccgtaggaatcaaaaatcaattgaaagaccctacaccaaattgaaatggaacgtacaaaacaagccaaaggaagtgtggaaaagtcaaagaagctttagccaatagaaggaaacttagtggaagttactagctaataggaattagtaggagacaaaaggaatctaccataaatgcttagcttctttagtaagatgaagataagaaaaaccttctccaagctactagtcaccatgcaatggaagggagaagaaagaattgtgtggtacaagtcaaccaataagaacaaagcacctaagctagtagtcatcatgacttaagagatatttgaagcaaattttttattttgtttcctttgaccaaatacgtggacagctagaaaaattatttctatgatcccaacggtcacaagttagatatatgggttaggagtatgtctttaaaattttaagaaaatccaacggttaacaagttccgaatgaatatttttgtaacacgggttttgggcagaaatttttatgactaagtctaagatacctatggttttgaataaaaatcaatgggaatgcttcttgagtaagttagaccacgtgtaattgagaataaaagaggagaaatgatgtagaaaaagccaataatgataacatggaaggttgaaaagtcaagctaaaatctaattggttcatgtaaaggagtaataaatgcttagaatcttgtaagatacaaggcactaaccgtaggaactaaagccaactaagaatatcctaaataattgaaatagcatgtgaggaagagtgatggagctagagaatggtggaaatttcatgaagaaggccacttggaagcaagccattcattaaccaataagagaaaagcatatggaaagctagcattaatggctaagtaagattttttttagattttgcttcaaagccaagctaatctccctctataaaaagggtgagtccgtaaacttggctggagaaaaaagaggagtaaacgtgcagccttaagctttgtcactttcaaaacaaattaaacactttccaagtgaaatcaaaaaggtaaccgtgcacttctctctttgcaaccttcttaccttgactttgctatccttttcaagacatatcttccatttaaaaagaaaaatcaaagaccacctaccttaaattacacgtgaagatcaaagaaaaaggaagcaaaggctattcaattttaaggaaagaaaggtatggggagtttatgatgaacctagtttgattttaatccttgcttgattttaagatactttgtatcctaagtgtttgattaaatttctcaaagatttaagaatgattaaatacatgagtaagtgattaactaatttgaatctaattggatgaaggtaatatggctaatcttaagaaaaatagttgttagaatatattactataatttgggtgttggccgaaatttcatatgtttcgttaagcatctatattttaatttaatgctagaaattgtttgagaacatatctaatatattggattctatgaaaaattaagaaacaaagtttgttatcatatgtttgataaaaagcacttaaataaaataaagatggtttaagtgttgatattaaaagaaatgtttgtgttgttgagtgtttctattaaaatttatagaattcatgtattgcttgatgattcttaaatcttgatgaactttgagtgttgtatgatgaatcttgatgaattttgagtatcacattgagtggtgtattgtgttgatgtggtgatatgacctaagtgttaagaagatgaaatacacagagattatgtgaagttaatatgttgcttatgaacccacatgcattttaagtggttttatgatatgaaaagagtattcatacatgaaccatgagcatatacccgagcgggggttaatccgcagagttatgacctcatgaggaggtgtgtcagatagctaaactgagttcatgcgttcagacaagaggagtctgagctggggggtagttgagacagtgaggaccacaccaccatgatgatcacatgggtggaggtgacattcctatgcgccactgggctaccctgactggttggataagttcgttccactgagagagggtggggctatcttgactgtggccactaatattgagatgttgagaagctgagatctcagtcatgcatcatataaaaagatgaacatgcattccatacattacataatgagtatatgagtatttgtgggctgagtaaatgggatgaattaatctgtgaatgaattttcagtcatataaaaagagataagcatgcattctatacatcacatgataagcttgtgaaataattatctgttgagaggatgttgtgtgaaggatatgaattaattcgtgtgctgaggtaatttaatctgtggatgaaccttctgtcttataaatattattgtttatgtatgtattttgttatatatgtgttttattcattacgtattttgttatgtatgttttattcaaactttgtttatcataaaacttaccctatgttgtgtcggtggttgacacctgtgatgaccccaattcatttgggcgagcagaggaacaggaaagcgtgaactgtagatgaaggatgatgaagaagttttgacgatttgattgtgtaattttgtggcatgtaattgtattagacagtctgtgtattattctggatcactgtatcttattattataattaaaccgtggtgaggaagaatcatgtacgttacgaacgaatcatttgtaagcaaagcaaaaggaatttttgtgaaaaatttataactaaaaatgttataatacagaaagaacacgaattttcatataaaaacaatcaagcacgagtgagtaaagagaggtgttacatggcgactccaacaaaaagaagatctctctccaaggtcacctactattgctcatctgctcacacaaacgaaagttcatgatcatcacagttaccaacgatacggtacaacaaatacaagagtgagtttattatataaaaccaacaagcatcatataacaacaattggataggaaacaacattaacaaccacaatcattaccaaaagtccatcagtccaatacacactcaacaaaaccatcatccaattcaattcacaactcaaacaaccatgctcagaatgatgcatgcactgactcatctcccataatgcaatgtggtaccatcctaatggaaatatcctctctcaggaaaatgatgtagtagcttgtcgaggccaccctgtggtgcacttgttactccccccatggtgatcagccctgagtctcaagggagttccaaacagagtgatttcccctagtacccctagtacttactgtccatcattctattttcatccatgcagatatgaagtattaaacatgggcaccatcaatgcactgaccatggatagatagggaccagaattttaaacaatccctttctcccttgggatgcttaaaattcgtaaaccctccctcgcaaggttatccagtcatgcacccctcatgtacatacacaacatcatcgatgcactgaccatggatagctagagaccaaaattttaaacaatatttttctctcctgggatgcttaatgtaacaccccgtatgcatccggtgtattaacatattacttaatcagatgaatgcataattacttttaattaaaaagccgcggaagcgatttcaaaaccatatttcttgattcattatgtatggtacgtataaatagtaaatcaaacgaatgccagattaccacagcagccttagtgatccagatgacgtacaacaacggcagataaaactatactatccacaccgatataccaggaggttataaaccagagatacccacctgcctatacatggattatatgtacactccacatacaatagtaggcatcagtgccctgatatcacatatcaaatcctcatatgagggtacaccatataaaggaattcaatatatgcaagcatacacacttttccccacagggtacaaactaacaacacatatcatatatacatgtctatacacaagagtgagcaaccaagctctcaaaacactgctccaagcagctataccatgtatgtccccgactagagcctctcgccttgggtcccttatctctgtcaacagtaccacctgcaaaatataatccccacacacggggtgagataaaaatctgagtaagctcagggttcttgaagcttctccttcaccctggctcacttccatgatcacaatacattaataggaatcacaacatcatcataacaacacataggcacacacaagctctaatgtgtacatcataagtatccaggaccatctcagtcccctaagaccatctcagtacccagtaagtcatcgtggaccatctcagtccacagtgtgaggccggaactcacacctgtgtcatccaacgggagttatccctacacaaggaataggctgctacatcatgagaccacctatctcttggtcttaaggaatctatcctatggagcaaaccaaactaggagttgcgctctactcctagggaggtccatatctatctactggccagaagatctatccgaaaggcaaccatacacaaagcacagatacatgcatacatatcatcatgaagaaagctgtaacaaccaattcaatgcatgtcaatcatatatgcacccatcactctttctcagagtatgggggaacacaagtagtgggaaacactcccagaacgaagagcttacctggcacggtagtgctctgctgtccaattcctggactgtggtctccgccactaacattctcggtgtcccaccctatatacaggcatacggcacaatcaatcatcaataacaccatacaaaaaacctaacaacggttctcaaccgtttaatgaaaggaaaacacaattcctttctataaccctctcaatcaactatcttagggttatttgaactagccacctcataggtgactcacagaccctcagcagaatctatctcagcctaaccaaggcattagagtctctctaagactctgtataagttaattcaactagttcaatttcctttaaccaggccatatatcactaattattcaccttaactaaaacggttattttaacacatattcactgtctatttagccttctgagtaatttttgtaaaagcactcaggctcatatatctcataatacctttcatttcatcaacattcttcctactcatacatatcacagagtcaaaaccaaacttcatcagaaatcatgttcaaagcttaatattcatcagaccaacctcctgagcatacttttctaaagaactcaagctaattccagccctatcacaaagtggtcactattcatcccaagaacagtttcacaaatcaaacagtaaaacttgagtttcttacctctaaatcgacaagaaaggctagagaacagcttttccaagacttgaacgtccttaaaacgccttcttttctcctcagaatcaaactttgtgaatttccttagagaactggatctctctgtttgatggctttcaaagaaaagtgatgatggaatctatctcattcagtagttcctttcaactttcatgttgggtgtgaagggttttggtcaacggttgagtgtttaagaagcttctctagttcatcaatggcagaagtagagaaaaggaagaaagcaaagagagagaaggctatgggaagagagagagagagactgttatacttaaaattcgtaaacccttcctcgcaaggatatccaaccggtcactacaccccacatggacatatatcgcatacaaccatggacaccatcaatgcatgacctggttaggaacaaatccttccatgcaaggataaccaatcatacacccccatgggtatccatgtatatccaaatcacacaatgacattgttcacatcaatattatttctcatcaatgtcattatcaatatccacatcatgtcatctcaatgtcatcaataacatcgacgccatttcatttcaacatcatcatcataacaccaatatcatctcatttcaacattatcaaccacattaacattatctcatttcaacattatcatccacattaacattatctcatttaaacatcaccaacaacataaacattatctcatttcaacatcatcatcataatcatcaatatcatctctttcattcacaatccatattaccacgagactggtattttaggaaaattctaaattaaagaggaggactacaatatagaaaacacactcttatgcccatttaaaatttaataaagaattaaatagaaaaatatgttataaaattttgggcagagtctcctctgtaattaagacttttcccaaaaaatccaatcattgaaacaacaatatcattcacagttttatccatcaacaagccaattcatcgcatcccactacttaaaaacacattttttttctttttcttgaacacacataggaacaaacacacatcaatcataaatacatcgaatcccattagttaaaaatgtcgtttttcatgaaaaccaacacacagcagggacatggagttatcttcatagttggactccgtagcccacaactatggtaccaaaactataactaaataataaactcctcttacctatttatatccttctgttagctccttgaaatgtcgttttgggatctctcaagttcacgtgttttggccaaaacacggagctctatataccaaattgaagatattttagtatagatttcaaaaaccaggctaacattagcatttggggtcaaatacccactcaaatttaaaaaggggctaaaatggtgttttgggagttcacatcaaaagacattattttgaaattccgatcacaccagtgtgaccggagctcaacaaagatcacaaaattgatatctatttcctaaaaaggagacttgtacaacatctcattttcaaggggttttcaaaggatgtataaaacttctaacaacggtatccaaaacgtaagagacactaagaaaagcttaaactagctagaagaagacaaaggaaaccaacattaccttaaggaaaccaagaaaggaggattggaggcttcgctctctaccggatccttgagttgagttttgaagatttcactccgattaaactgttcctcttcgtgtggtggtccaacggcaagcgaggatgcctcgtggtggtctctggttgctatgggtggtggaggaggatggtggggagcttgggagctatttgggggagggagaagaccaattttcgtggtctggacactattgtatgtatttatcatcgccttgactcgcccaggtgagcaaaaatgcctgcaaaattagcctgggcgagctaacccaattttaaaatttatgcttatgtgaaaaattaatttgaaggtgatacaacagttaaccaatccagaatggtgattttactaaaacaatttttgggtcaaactcggaatcactcaattacaacgtagctcaaacaaactccacataacttgacatttacaccaagcaattgcacatggataatttacacaataaatcaactaatctaaactaatcaaataatcaaataacacaaatacatcaaacatctatttttagttatcaaaatttcaggatgttacacaggttcctaccattgtcagctattctacaaaagtcagatgtatacaaccttaccctcaaagaggatgtttccataacttttgtccttcaccactaaagtcaaaagtcataaagcaaatttttcctcttcatattttttcaaaaagtgtttttatcttcacatgagcaatggaaaatgcatttatttatgcatatgcaataaagataaagtatctagcaaccttaaattggttattttctttaccttaactaactcatcttacaaatcctcattaattatcaaaatgcagcaattgaaaatgaaatgcatttattgcccatttgggaataccaaataaatggcgtgctaaaccctcaaggcattgctttaagtctgttgctgcaaataatgtggcatccattccagatccctcacattattctcgaacgaaaaacccgaaagccttccatctacataataaaaaagatgaaattatattaagttaactattattagattaagccagatactgcatatggagtcatgtacaaacaatgttactatagtcatccttttgaataacattctttctttatcccttttttcctctattttatataacttttcgaaaggaaagggttaaagaatccacagatacttgttaaatagcatcacaaaaatgacttaagaattaaatcattttatcaaatgcaacaccatgtacaagaaaagactgaagaatgatataatttcatcaaaagcaacaccattaaagaactgaagagccatttgatcaaaggcccctaagcatgttataagccacataaacgcaaccacaaatttcaacaatttttaaaacaagccttgaaagcaaggtaatcttatgcatttgtttcctactagtttaaagcataaaaggaaaaattaagttccagaccactatcctcaatggtttgactagaagtctaaaactattcttgaccaggttgatcagaacctaaaattggatgataatagattcgttcacggtagatccatatttttagtctagatgccaaggcgtctttaatctgcaccaacaaatatgtgttaacttcatattcggggaagaataacatataaaggagtaaaacaagcactcatcactaggagtttgagtgcataaatataaaatttaaatgatcacaattattcatcagaggccaagtagagaaattttagaagttgaacctgaaggatatgatatagtccactgacttcaccttagtcatctcctgtttcagcttacaaaccctctccaacaacttgttaaatgaaacctcaaccctagagtcaacattcctcccatcaggcaaatagagaaggcaaatatccctcaccttatgcaaaggcaaacctaatttcctagcaagaaccccaagagggatcccatttattacattgaggacactcccatcaaaatccactgcaacctcaacccaaccaccactcatcttcttagtcttaacccttccaccgagttggatcctgttgattcaagtgaagtcaagtatcaagaatgaagatcaagcttcaaggttttggacattcaaacatgcacaaatggagatgctcaaagggaagcttaaagaatcaatttgatcatatgtaaaaggaagtatatgatctgataatccatgtgtatgtgtgtgtgagtcatgcatcattcattcatttaagatcattggattaaataattaagtaaaagaaattgatttaaaaggcacttagaaaaataagtttttggaaaaattaagtaacaaataaataatcgattacaagaagtagaacatcgattattttgttcttcgtgctctttagaaaacaaagtatgatcattgtaatcgattacatatggttttaatcgattactcaggatttttatgaaaaatggtgctttcggtcttaatcgattacataagagtttaatcgattacttgcttgaacatacatctcaagaaaatgcatgctgattgtcttaatcaattacttcatggaataatcgattatattgttctttgactaaatccagaaaagctcataaacattttaatcgattacagtttgtcattaatcgattactttgtataacttgaaaaaacatgtgcctcgggcttaatcgattacgtatcggaataatcgattaaataactcgttcttggaactctgaatgtttcataagctttttaatcgattactatcttgatttaatcgattacaaatgataaataatcgatttctagagcgtacttgatcgattatcttcagttaattgacagttataaatagaatgtctgcgactgaaattaaaaaaggagagctaagaattcgtgtgcaattgagagattattgttgtaaacattcacaaacattctggatattcatctgtgatagagaaacacgtagaaacttcattagattcatgtgggtatattgatcatgagctgaagttttcttcttgcaatcaagttacaagaaaagctgcatatctgtggtgataatctgcatactcatctgttaatcattcatattcattcaacaatggattatcaggtgatattttttcttggcttttgattgtgtaaaacaatttctttgtaaattggtaaaagtatttctgttgtaattagtttcttgcaagcaaagagatagggtttctctaggattcacctaggtagggttctcagggtgaagggtttgtctctaagaatctaatagggttttagatttatgaatttcttctagggttgaaggaaagagacttgtaatattgcttttaaagattttattgcaatagtggaactcctctctagtgttgagttggagaactggatgtagcctcgtagtgtttgaggtgaaccagtataaaaatctgtgtgttctctttattcttccagttcaatttcgtattactttgtttgtgaatcaatatcattgctcagatttgtaatactttgttttctgatgctcataaaaagggaagattgattgaaaactgattttgatattgagatttgttttgtctttgaaaattggtttaaatgtgataaagattctgtggttcataactctgatgtaaaattttaattggacaagttttcaaccaattcaccccccctcttggttgtttgaagtgttcctttatatttcagatcctaccttccaaaatcaaaactttaaaccccataaacaccaattgtctcgcagcaaccaaacttgcgaacctggcaccaatcacaatcattgttcctcagtcggacctatcgaaaggttttagctttagggttttgatctcctgcgcgaggtcgaagtttatgtaatcgtgctccagtaggaaccggtaaccttggaccttgtgtatgaaccgaatctaccggaaggcccggtgatgggttaaaaagatcgaaaccttggaccgccaatgcgccaatatatggtttcgaacgctgatgtagttggattgttcagagcctccaatggtggaaaccacgtttgcttaaatctcttcttccgtgaaagagtccacggggaatcctaccgagatcgcgattagggggagcatcatgaagattaaaaaaagatttgattcaagattggttttgagctttcaacatgcttagatgccttgaagttgtttaattgtattatgtgtaagagaaaggctaatctgatgatccatgcattgcattcactcattcattcataaacttaaatggttttcataaaaaataacaaagcttttatattctgattaaggttttaatttgattgaaaggtttttggaaaaatgctattttcactggtttaattgattaccttaatgatataatcgattattttgttcttcgttcatttggaaaatcttttatgaacattgtaatcgattacccattggaataatcgattatttggcctttgtttataacaaaactgctttgttaatgattttaatcgattacttaagtattgtaatcgattacatagttacaatattattttaagccttgctgtgataatcgattatcattatcaataatcgattacataggctatttgagaaaagtcacttccctgtcttaatcgattaccacaacttgtaatcgattacatagttcattttgaaaatataagtcttctgctttaatcgattaccaaatattgtaatcgattacatagtgcattttgttatcctgagacttctgtcttaatcgattacagctcgggataatcgattattttgctcgttggtgaaacccagaaacattcatgaacagtttaatcgattacatgggtattttaatcgattacataagaattttaatcgattatcaggcgcgtttaatcgattatagttagttacaaattctgttataaataggattgaaggcttggcttgttttataactttgagagattgtacccatttgtagcaattcctaagtgattttctcagtgtttttacttcttgtttcattcaaaacatcaatgggtctttgaatgattcttgagcaagattcttttcaagattaaggaaaggcatgttctgatttagtttgctactcaacctgatttggtaattcatgttcataacatttattggatcatcaggttgtctctctccttaatctttgtgtgtaaattcggttctgaattcttattgtatttgactattgtaaagtgggttcttcttgcttgaatctagagaagggttctctagtgtgaagaacaaagtgtgttctctggttcttgctccttagatttctaatagggttttagatttctattctttatctagtgttgataaaggggaggtttttgtaaaagcttgtaagaacaaaaatttataatagtggaactctaatctagtgttgattagaagaaactggatgtagcttcagttgtgaagtgaaccagtataaattgcttgtgtctttgatgttatttctctatctcatcttattcattggtctttgattctttgattcatattcattgttcaacaagttctgttttgatctattgatttcttaggctgagacatttgattgagtaaaaagatttcttggttttgaaagtgataaagatccttaactctgatttgaataagtttttaaaataccaaggttttaaccaattcacccccctcccctcttggttatcgtgggtattcctattattttcattgtttgcaactgagagacatgcaaaaggcttcaataccaattgatgcaaactttggagaaccatactaccaaaacttgtcattgtgttagtggttggaaagttcaaaatcataaacttccaatgtgagactcatgccccacaacatataattagattttacacaactatacataaataggagtgcacccaggaaaataatcatatacataatacctaatcttgatagtgttttaacagtaacaagaattaaaggaaagacagacaagaatagaaaatcatgtattagagcttacttggattatcgactccaaggtttagaaagcaaccagttccacttttaaaacacgaaggaagttgtgcaaatggtatacctcttgtaaggacccttatcctttttctttttcggcgcttaaccccgcgcgatagggcggggattcaggttagaaagccggtgaaaggtgcttaaaaatgcaagttttatggctgttctggcatatggcgcgacccacttgaagggtggcgtgacacgcgccatatgtgttatacagggcagatggttctgccataccacgcgagtcgcgtgaagatccacgtgagtcgcgtgggaagtggtccaggaagcatgatttgtcactgggactccacgcgagtcacttgggatccacgcgagtcgcgtggaaggcccgaagagatggcgcgagtcgcgtggatatatggcgcgagtcgcgtgataagtggctcagaaaggtgatttctgtctgccatctcaagtggatcgcgtgggaggtcaagtgagtcgcgtgagaacgtcggcagaccagtttttaaaggccaaaacgtgagaaatggaggatattaccatttcttcttcctccactcagcccaacctccattgatgattccccaagcttcctaggaccttgttttgagccctaaacacttccctgaaccttagaaacttgtttgaaccgagtagaaagcttgaatccttcatcaatttccttaaaaaccccagattgagtgagaagaggaacctcagagggaaaagctcagagaactcgagcttggcgcagaaccacagcgtaattggaacatagaagctaggaaaagctgttctgaggctgttggagtcgccactgaggcattgattgtgagactattgttggcgggagccacagacctgggaaggaattgctgactgagaccttaccaggtaagttcagtgtctctgggggatgaattcccatcttgtgtgccacaccacactccgggggagtggtggtcatttcatgatgcatgcattggtagttgcatcctcataatgatgtatgtatgcatatgtgcttgatattgtgctgtgatatgactgtgatagatctgttggccaatagatagatatggacctccctaggagatggttttccttctagcatggctggctcttggttgaggtagctcccaggggattgattcccacaggccaggggattagaagttgaggtagctccttcttttctcggaggtgccatatgttgtgcatccatgcgaagggttagcacccaatgggatggcacaggtgcgagttccggactcccactgatttaggcgttgaggtagctccgccaggcgttgaggcagctccgccatgtttgtatgctatgcttatgttgttatgagggccagtgggccaggccggtgggccatttgcttgtgattgcctgatgtatgtgctatggaagtgggccagggtggaggagaagcctccatggaccctgagcttactgagatttgttatctcaccccgtgtgggggattatgcttttcaggtgactcttccggacgaagagagcagtctcagggcaggaggcccgagtagagactttcctgctaggctgatggcagcagatggagctgataggctcatttttggattgttgattacattttgtaccctagagcagggatggagtgtgtgtactcctgatgattagtatagttctgtatacccctgcgagggatgatattcttttgtgtcacacgatgtggtgtgagtactgatgtatatttgtacagaactagatatgttatgtatatgagacgagttctcctgagtttagctgttgtatctttgatgaatctgcctaactctgttagttatctgtctgtatgggttatgctatgagaaactggatcagcaggggtatgccttatgtgattttgtgtgatttcatacataatgtatcaagaaaagcgattctgagcttccgctgagttttataaactatgttttaaacgttaaactgatattatgaatgataacacgtcggaggcctacggggtgttacattttatggtatcagagtcgtttcttgataagaacattatgtatggaatttgagttggtgcttgtctgtggttgtttgacatgagcattgcatgggggtacattaactgtgggcctgatcaactcactgtgtgatgtacatgtgtagtgccatggtgagacctagaggcaccagaggggctaccaatgcccagactgatccagttgcggctgctttagccgccatgcagcaagaattggctgctaatagacagatgcaggcagatatgtagcaagaaatggctgccacccgaggggtgaatgaggccttgatgaaggctaaccaggacttgctagaggaggtgagaaacctcaggaggaatgacagagcatcctccacacctcctgcaccagagggcgaggctagtcgtccgcaggcaggtgcgagtcaccacggagtggatcagatgacccagttagaggtcgacagtgaggtagcagctagagggaagatgctgcttacctttaggaagcatgaccctccagtgttctctggaggctatgatccggtggctgcagctgggtggctgcaagatttagagaagattttcgaggtgatggagtgccccgatcaccagaggttgttgtatgcaacctacatgcttcagggagatgcccacaagtggtggaagaccactgttcctcttctgagaggccggggagaggtgattacctggcagctgtttgagtcctggttcctggacaggtactttcctagagatgccagggagcagaagcaggctcagtttgatagtctcgtccaggggactatgacagtggacgagtatctggctcagtttaatgagctggcccagtatgctcactttaggagacccatgcctgatgcagagactttagcagctaagttcctgcggggacttagagacgacatccaggtgttggtagctggtctggggtcacgagatatggataccctggtgagacagagtcgccaggtggagggtatcctgcagagacagcagagaggcagacagtctactccctcagacagacaggaggggagaaggccccgcagttctggcccgcccgggaagggtaagggcaagatgttgagagtctctgcaccctctgacagattcaagagggatgtggctcggaggaggttagtccccaagtgtccagcttgtgggaaggagcatacaggagcctgttcgtccggtcagatcatctgtttccgctgtggcaagccaggccacatattcagagagtgcccacagacgaagagacgggcacaggctgctcccgcagagttggtggcacccacagcaggcagggtgtatactgtagatgcaagagaagcagccagagctccagacctgatcagaggtacagttctgatcgatgattgtgatattagagtgctgtttgattctggagccacacattccttcatacaggatgtgattgttgataggcttagattgcctaagcatagttttgctcctccgatggaggttatcacagcatctagagaaagatgccaggtgagcacgtgctgcaaggacgtgcagtttttgtttgagggcagagcttatgtggttgatctcttctgtctagctatgcctacccttgagatgattttgggtatggactggatgaccaagtatggtgtgatgctagactgttatcagaaaagagttgtagtaccttctgaagggaccagttcgagttctgccttattcttatcagtcttgcaagctcgcaaggcaatcatggagggagctcagggttatatcttcttgggtgtgacagaggataagcccggtgatgatttgtctcagatccctgtggttagtgagtttgtggatgtttttccagaggagatcactcagctaccaccagagagggagatagagttctccattgatttggttcctggtgtgggaccaatatctgtggcaccttatcgtatggctcctctggagttgagggagctaaaggtgcagttggaggacctgctgtccaagcagttcattagaccgagtgtctcgccttggggagcaccggttatcttcgtgaagaaaaaggatggcagtatgagattgtgtgtggactataggcagttgaataaggttactgtgaagaacaagtatcctctgcctcgtatagatgatctgttagatcagttgaggggagccagagtgttctccaagattgacctgagatccggatatcatcagattcggattaagcctgctgacatacctaagacagccttccggtctaggtatggtcattatgagtatcaggtcattccttttggtctgacgaatgccccagctgtgttcatggactatatgaacagggtattcagaccttttctggaccagtttgtagtggtgttcattgatgacatcctgatctactccaaaacggagtcagagcatgccgagcatctcaggacagtccttcagattttgagggacaagcagctgtatgctaaatttgccaagtgtgagttctggttgacagaggtgaagttccttggccatgtgatctcagcatctggagtatctgtggatcccagcaagatagaagcagtgatttcctgggagagacccaaggacgtgtctgagatcaggagtttcctgggattggctggctactacaggaggtttattcaggggttttcccagttagtggtacctctgactcgactcacacggaagggggttccatttgtgtggacccatgagtgcgagcaatgtttccaggagctgaaagagcgattgaccacagccccagtgttgactcttccagatcccgagggagtctttgaggtgttctgtgatgcatccaagagaggacttgggtgtgtactgctgcaggataagaaggtagttgcttatgcttccaggcaactgaaacctcatgaagagtcttatcctactcatgatttggagttggcagctgtggtgcttgctctgaagatatggaggcactatctgtatggtgccaagctgatagtgttcagtgaccacaagagtctcagatacctctttgatcagaaggagttgaatatgagacagaggcgttggatggaattcctgaaggactatgacttcgagttgagataccatccaggcaaggctaacgtggttgctgatgctttgagcaggaagaatgtgactgctgcatgtatgatgatctctgattgtcagctgatagagcaattcagagatatgcacctagcagtgacagaaggtgcacatggtcttgagttgagcaggaccaaggtagataatgagctgatcaggaggatccgagaagctcagcagcaggatgaggatgtgagggccatgattggccaatcagatgtttcctgggaggaccatgagttggtgatgtacagagaccgtatagtggtgcctaagggcaatttgagggatgttgtcctgactgaggcacataagggccagtttagtattcatccgggagccaccaagatgtatcaagatctgaagaggagtttctggtggccagggatgaaaagagacatagccgagtatgtggctaagtgtctagtgtgtcagaaggtgaagattgagcaccagagaccgtcaggcctgcttcagcctttagagatccctgaatggaaatgggacagtatttccatggatttcgtggtagggctaccgaggacacagagtggatgcgactccatctgggtgatattggacaggctgactaagtctgctcatttcttgcctgtgagatctgaccacaccacagagaagttggcccagttatatgtcagggagattgtgagactgcatggagtccctgacagtatcatcagtgatcgggatccgaaattcacctcaaggttctggggtgcacttcaggaggcttttgggacccagcttagactcagcacagcctaccatcctcagacagatggtcagacagagaggactatccagactttggaggatatgctgagaccttgtgccttggagcaaggtactagctgggaccggtatctgcctctggtggagttctcctacaacaatagttttcatgctagtttgggcatggcaccctatgaggctttgtatggccgaaggtgcagaactccagtatgttggacagaggtaggagagaagcaattacttggacctgaaatggttcaagagacctctgagcagatcaagatgattcgagacaagctgatgaaggctcagagtcgacagaggagttattatgaccagaagcacagacccttgcagttcgaggagggtgatcacgtgtttctaaagctatctcctgtgacgggcgtaggacgagctttgggtgtgagaaagctgagtcctaggttcattggtccatatcagatcctgcagaaggttgggccagtggcatacaggctagctttgcctccccagttgtcagggcttcacgatgtattccacgtatctcagttgaggaaatatgtggcagacccctcacacgtggttgagcctgacacaatccaggtcagagagaatctgacaagtcctacacggcccttgaggattctggacagaatggagaagcagatccgcagcaagaccattcccatagtcaaggtacagtgggaaggcagaacacctgaagaagcaacttgggagcgtgagcaggagctgctgcagaggtatcccgagttggctaacaggtatgtttttgaattttgcggacaaaattctttaaaaggaggggtgaatgtaaggacccttatcctttttctttttcggcgcttaaccccgcgcgatagggcggggattcaggttagaaagccggtgaaaggtgcttaaaaatgcaagttttatggctgttctggcatatggcgcgacccacttgaagggtggcgcgacacgcgccatatgtgttatacagggcagatggttctgccataccacgcgagtcgcgtgaagatccacgtgagtcgcgtgggaagtggtccaggaagcatgatttgtcactgggactccacgcgagtcacttgggatccacgcgagtcgcgtggaaggcccgaagagatggcgcgagtcgcgtggatatatggcgcgagtcgcgtgataagtggctcagaaaggtgatttctgtctgccatctcaagtggatcgcgtgggaggtcaagtgagtcgcgtgagaacgtcggcagaccagtttttaaaggccaaaacgtgagaaatggaggatattaccatttcttcttcctccactcagcccaacctccattgatgattccccaagcttcctaggaccttgttttgagccctaaacacttccctgaaccttagaaacttgtttgaaccgagtagaaagcttgaatccttcatcaatttccttaaaaaccccagattgagtgagaagaggaacctcagagggaaaagctcagagaactcgagcttggcgcagaaccacagcgtaattggaacatagaagctaggaaaagctgttctgaggctgttggagtcgccactgaggcattgattgtgagactattgtttgcgggagccacagacctgggaaggaattgctgactgagaccttaccaggtaagttcagtgtctctgggggatgaattcccatcttgtgtgccacaccacactccgggggagtggtggtcatttcatgatgcatgcattggtagttgcatcctcataatgatgtatgtatgcatatgtgcttgatattgtgctgtgatatgactgtgatagatctgttggccaatagatagatatggacctccctaggagatggttttccttctagcatggctggctcttggttgaggtagctcccaggggattgattcccacaggccaggggattagaagttgaggtagctccttcttttctcggaggtgccatatgttgtgcatccatgcgaagggttagcacccaatgggatggcacaggtgcgagttccggactcccactgatttaggcgttgaggtagctccgccaggcgttgaggcagctccgccatgtttgtatgctatgcttatgttgttatgagggccagtgggccaggccggtgggccatttgcttgtgattgcctgatgtatgtgctatggaagtgggccagggtggaggagaagcctccatggaccctgagcttactgagatttgttatctcaccccgtgtgggggattatgcttttcaggtgactcttccggacgaagagagcagtctcagggcaggaggcccgagtagagactttcctgctaggctgatggcagcagatggagctgataggctcatttttggattgttgattacattttgtaccctagagcagggatggagtgtgtgtactcctgatgattagtatagttctgtatacccctgcgagggatgatattcttttgtgtcacacgatgtggtgtgagtactgatgtatatttgtacagaactagatatgttatgtatatgagacgagttctcctgagtttagctgttgtatctttgatgaatctgcctaactctgttagttatctgtctgtatgggttatgctatgagaaactggatcagcaggggtatgccttatgtgattttgtgtgatttcatacataatgtatcaagaaaagcgattctgagcttccgctgagttttataaactatgttttaaacgttaaactgatattatgaatgataacacgtcggaggcctacggggtgttacacctctcaagttagaaagtataggtagagacataagtacaaaaaaaacctacaataaatatcagatgcaagccataaatacctttcaataactctttaagtaataactttttaaaacaaaaataatcaaacttgaaatgccaacaagagaaagtatccagaacataggtcaatgttgtgctacctttagaaaaattgccttcccaacaaagtcaatgaagataaatgccaaggtatccaaaccttgttttccaattatcccatgatcccttcataactacttctaatccatcataactccaagtagacattgttggaattcctacttcgctgtacatatcttcataccttgaagttgtctccatctaggaacaactttggaacatgcatctcatcaggtctttgtagcggaaccaccggaacctatacaagggaaagggaattcttgccaattgatgaaaacagagagtccatgacaaaaaaggtagcgaaagggccacatccaacaccagacaacacatctgaattactgggaaaacaaatatgaggggatggggatttgcatcaaacatcatcttcttcttcttctttaacatgtaaattagtgtctttttcattttttttgcttctttaacatgtaaatttagtgtcttttttatttttttgttttccgtttcttttcttatatattatcctattgatatgcactttttagcataatttaaattttaaaatgtgtataaagcagttgtttatctataacagcttttctgatctaatataaacaagtaaatagagttgtcttcttcttattcttctttttattaattttcaattttaaattaattaacttttcctgttattctttcttcttattctaactttttatttctcctgtcaacaaatctccaacaaacatgaaaatccattcacaaaaatgatgagggcaagtgaattctcaatattagtttaaggttagtacaagaacaagttttctctattttcttgtgaaaaagataccaatttctccttccaggacctgttatgaatggtcttgcacaagcaataataccttatgcacaaacaataattatgcaagcaacacaacacaatttttaacgtggaaaaccttctcaatgtgagaaataaaaaccacaggaccgatctcggagtccacccaaattcttcagcatcaataaagtgagattacaaaatggtttcaacaaccattacaatcaacaaacaacttcaacaaaagttgtaccaaaccatcacaagaggcaaacacacaaaataagcctttgtacgaaattaatttctaccaccataaataacaactaacaaatcccaactgtcaaattgacgtattacaagaaaggaacatactgaacaaatttgaggacaatccaacggttgagcaaagagataactcttcttcaatatcactgcccgaaataagacagaacagagcagaaattctgataacctctatttgcagtttaaacaatccctcttgaaaacaggttaatgaatgatccaaactgtcagaatgttgaaacggattttattaaccgttcctcaaagtagaaacggttagtatgagagaaatgtccctcgcaataacgctgcatgcttcagaaaacggtttcagaaccagttaggtttgggaatttctagtgatgctaccagcctctaatcaagaaaccaaccgttagatgttattattggtgagtcacgaacttgctgtaaaagtttcactaagatctaatagttaaacagggagatagagaagattgaagtatgacattttctacccttctgcacatacgaattttgatggtttctataatacctttggaaattaagtctggattaagagttataatcatgcataagaatccctaaaagaaaagcaataggctgtttaggccatgtggcgcgacccgcgtggggtctggcgctatccgcgcgggaggcttgaataagggcaatgatttcggccttctgacgctatcagcgtggatatgacgctactcgtgtggatggttcgaacctgtggcgcgaccagcgcgggacttggggcaatcgtcgtggaaggtttgaatcaggccaatgctttcggccatctcacgctattcgcgtggatttggcgctaatggcgtgggttgctcgaacccttggcgcgatctgtaacaccccaaaattcagggaattacagataattattaagagtaaaatgttaaggaaaggcagtagaaaatttagggcaaaatgacataaatacccctgaacatttgtaaaaatgacgtttgtgcccctagggtgaaaatgacaattttgccctaaaacaattccggaattgaccaacatatccctagatattttagtaagatatttactaggaaaaattaccaaaatatcattggacaatttcaaaaatgactattatgtcctaggatggaaaatgacaattatacccctagacatttttgaaaaggaccaatatatcctagatattttgataaagatatttttgggggaaaattacaaaaaggtccttgaacaaattgggtaattaccattataccctaaggagataaatgaccaaaatgcccttgaagtcaaaactgaccagataaccttagaaatttgtaggaacctcactattggataaaatacttttagataatcatgaatcagtcaggttggaggcgaaaaacctcaggatagaatttctacaaattttggaaattagattaaaaagagcctaattcagactaccctaggcatcagaaaattatgagaagggtatgagtataatctatggaattttttcttaattgtgggaggaaaaggattcttaactaagttagtttagtaattttaataattaaagataatatggaccaataagaattagaagttagctattatgggaaaattggattaatatgaatttctaaactaagccttgaccgtatgatacacgatcaatggagaaaaactttaagaaacttcaagaacacacatatgaatagttaagaggcttggaaacatgtcattggtccacttgtatggaaaaaatttaatttaagtagatttttatcttgtttccttaggaagaatacgtggaaagttccaagaattattttaaagatcccaacggtaaaaagatagatatgtaagttaggattataccattaaaattttaagaagatccaacggttaatgaatccagaaccactatttttctaatacgggttttgggaaaatttaagaataaagtgaaaatcaccacaaagcaaagcataccatgtatgaaactaaaagctaaagggatctcctacacaaatgaagcaagacacgtggagaatgagctaggacaagggaagagtagaaaattcatgaaactagacacatggaaggtggaaaagtccaacttggatttgattggttcatgccttaagatatttaggtagtaaaattcacaaagctaaacactatccgtatgaaactaaaagcaagtggaattccctacactaaaggattagcacgtgaaaaaaaagaaagcaaggaacatataggcggtggaataatcaagaagcattacacatggaagctagaaaagcaatagccactaaaagaaaggcatatggaaagtaaaagagatatttagagatttttgtttacaaagcaaaagataacactcttataaagacaaggggaccgtgcaatccttgcctggttcattccaaaaacaattcaaaaacattttcaatgcaaaccaagaggaaaccgtgcaaacaccctagccttacatcactttattttcaaaatactttctaaacaaaccaagaatggcatagccgtgcaattactctcttttattctatcttcttcttatcttcatcttcttcatcattttcaaagcataccttatacctagaacaaaaaccaaggcttgagtatttggaagttcacgtgaaaaatagcaactctaagagcaaggattctttaattccaacaaagcaaagggctgtccaaacttaaggaaaaaaaaaggtatggggagtatttcgataaacatgaattagatagttgattaggattcaattctctttgattaaagccatgttcttgctttttttatgaaactttaagtgaggcataccatgtgtttgatgaaagtcctcaatgaactcaaaaatctataggctatgttttggatacctaattagtttagaatgaaatagttaattaaaaagattaattttgtgatcttggtagttaattatttgaggatgttgggttgttaatttagtggggctgtaatttaattatgctgtatactattaggatgctgtagaatatttagtaggattgctgtatttatttaagtggtaggttgctgtttcggtatttaagtaagtggtacgttgctgttgttgcaatttaattttaagctgttgtatattaagttgttgatgtaaagctgtatgtcattttattacgttgctgtatgttgttatacattttattaaaatgctgtatgttgttgttgctgtaataattaagttgctttatttgtggatgttgttggaagttattttattatgttgctattgtagtagttaaggctgtatatttattgggtcgccgtatattttatttggttttgattgctgtatgctgtatgtatgttgttgttgctgtaattaatgattacggtatgacactatacgctgtatataaggttgccgtatatcattagtatgttgttgtaagttgctgcacatatatgtatgttgctgtatttaatgtactgtatgttgttttgttatgttgagtattccataaagcacatcaaatgtttgataaaagatttcaaataaataaaataattatgtgacctttcaaggcacgtggtttggtgatgttatgcttttgatgttgagaaatttataaaggtgggaatccttgtattattaaagatgttgtggttaattatggattccaaatattgttaagcatggctgtatcctgagattatggtgtaaaagttttatgtgataagccatgagctgtaataatgtttaaagactggataaaataaatcgttcatgcattctcatatgcatatgcctagcgggggttaatccgtggtgttgtgcctggcgggggttaatccgcagagttgagtgtcagatagttagaggaactgagtatgagcgttcagactgtgagagtctgagctgggggatgcttcggcagtggggaactcacgccacccatgatgatcacatgtagtgtgggtgactttcctgtgcaccactgtgacatcctgactgatcatgcaagttctggaccagtgattggggctatctgactgtggccactgatgatgatgattttatgagaagctgagatctcagtcatgcatcatttattaaagaaaccatgcatcattcatcatatatttgttctataaatgttattttatgatacacatatatctgctgttcaatttaaatctattatgtatctgatatgtcattctgtttcctatcgattttctaattatgtttattaaaatacttacccgagttgtgtctgtggtttgacacctgtgatgaccccaatttatttgggtgagcagaagaacagtgagctgaggaaagcattaaggaagaagctggatgtctgtgtgctgttggatgactgtatgctttagctgtgactgtgatttctgtttgtttgtatttgtgccacgctgtattgtaatggactgtttatataaaactatttggactgtactcggctgctgataattcaatatgtattaatgaattttatttgcatggtcgtggtgaggaaaatcatttacagacaactcgtaaacttggaaagcaaagcgaaaagaattttggaaaaaatttgttctaatcaaattttaataccaagcggacacgagtttttaattaaaattaatcaagcacaagtgtgtaaagagaggcgttacacgatccgcgcggaacgtggtgcgatccgcgtgggactttcggtcagccttttataaatagctcattctggacggagctgagagaaaaaaagagaggaagagagagagaacgaccattgatgacccgcagagctttatatcttctccatctttcatctaaacacctctgacccaactgagaaagtgttcagagcctcgagataagctcgagacccagctttattctcgacaagaggcggtaaacggcaagatcaatatttctaagggagtccttggaatcgaagaaccagaggcaaaggaggctttgtatgagcgatctaccttagggaaagtgattccctggtttgtcttgactgcacataggtaagaaactcgagccttagccgttggttctgtgttgaggtttttggttggattttgagtatcttgagaggtgtttttggaggtgttagagctgttattaggcttgtactctgtagagttttgtgtttagagggttactctgatgaagttagagccttgagtcatcattattgatgaagtttgattttggctctgagtatgtatgagcggaggtaaaaggctaattatttggctagtatgaaccttagagtagttgacaaagttgcttatgggatagtatagatgttgtttgtgagctggaattggtgataatgagaagcttggaattgatctggataaagcagggatatgctttatattagcctgatcagagtcttagaagaggctctaaagccttgtgtaggctgagtaggatccttttgagggtctgagaatcacttgtgaagtgattgttcttgtgttatgtagaatggattataagtttcctttcgttctaaacggcttaaaactgtatttgataagtatgtgcttgttcttatgtaggacgtgagcttgatagtcctagtggtggtgaccacgaggccgggagagccaatattttgcctagagcaggtaagctcttggttcttgcatgtgcgtcctttactgtgttccaccatgatcctgatagggtgatggttctgttgtgattatatacatgtatatggaaattgtatgttgttatgattgcctgctgaatggtgttttgtaccctgtgagagggcaattgatgtgaattgatatgagatgcttgacctgtgagctgcaccctgagatgggtggttgatgtgtatggctatgaattgtctagcttatgatttgcatggttgattgttgaatcctatggtagtaggatagatgacatgagattgagtaagacctgatgtgagatgttcctgtgatatagacgtagcctcccgaatggagatgttcctatatctacagatgtagcctcctcaggcaagtgtattgagataggttatgagatgttcctgcaatatagatgtagcctccctgggtggagatgttcctatatctgtagatgtagcctcattataaagagatgctcccgttatatagatgtagcctcctaagtggagatgttcctatatatacggatgtagcctctgatagatgtattgagatcctgccatgagatgttcctagtatatagatgtagcctccctgggtggagatgttcctatatacatagatgtagcctctgcaggatagtgatgtatgtgatgaatggctgtatgccatgagtatagcctgattatggacaggtggatgtgcattgatggtgcatgttgattgattgagtgattcactgatgttgatattgcttgttttgatatactattttcatgtatatgtatgaaagtgaaccaggggaaggaaataccttcaagggccctgagtttactgggattttatatctcaccccttttgtgggacttatgttttcaagtgaaacctcaggaggcgtagatagatcccaaggcaagaagcctgtgcagggatagctgtgttttgaaaccttaggcatagatgacatgagcatgtggctctgatgtttcatattttgcctttggtttggttttgttgtaccctgaggggatagatttgtacagttttgtacttaaacagagaatttatgtatattcaccatattatagtgtacaatggttatgatagtgacctttgatgacgtcactcttcatttatgcttctaaacttcttaaactctgatgattatatgtgtgattgttgattaatataatgtttggtaatgaccctgatgattaaatggggcgttacagtttctttctcctctcctttttctttctcttgtgtgttttcaaattaactgtcaacatcttaaaagaagtaactactgacctattaaaagaaggaaccctaatctttccttattgggatggacttggcttgggattcaagcccaacaaatatccccctccagtccaatgagggagattccaaacatcaatcatcaagtaaattccataccgacaacaattaaattgttggaaaatcgagagaggtaaatattggagagattttacacgaatagatcatgagtaaccatataagtgaactggacatcactccttacttatatggtgctcaacttttctatttctatctgatgtaggactttaactcacacttgtactccaataatctctccctcaaagtgtgagtctcttccacatggtagtctccccctcgagcggaagtcattttcaatattcacaagtagtggtcctcagagcttatgctctagtactttgtatcgccgcaacacttgcgggactcgctgcctaacctccatgcatggactcacccgccaggaagactttcgatacaacggatctccacgtccatggattcacaaacgccttcttacttgttcgagccggtcaccaagtcaaaccatcggctctaacttctcaaaagtttcttctctacttgatcatagaacatgttgtcaaactcatcaagtccatatccaataaacacacactgtcgtgttttaacatcaagtttggatctctcatctttggggatatgcacaaaagccttgcacccaaagacacgcaaatgatcatagaaaacattcctaccagtccaaactttctccggaacatcaaattgcaatggaacacatggtgtgagatttaaaacatgaacaacaatgtgactaagcctcttgtgccacaactccattgtatctttgtaacaccccaaaatttagggaattacagacaattactaaaagtaaaatattaatgaaaggcagtagaaaaatttagggcaaaatgacaagaacgcccctgaacaatttcagaaatgacgtttatgtccctagggcaaaaatgacaaatttgccctgaacaattctaaaaatgaccaatgtatccctagatattttaataagatatttactaggagaaattaccaaaatgtccttagacaattttaaatgacatataggtccctgaagcactaaatgaccaaaatgcccctggacattttagaaaatgaccaaaatacccctaggtcaaaaataaccaaaatgacttcagaaaattatgaaaacctgaatataggataaaatatccttagataacgaattattagtaaggtggggagcagagaaacctaaaataagatttcaacgaattttggaaaaataagttgcaaagagcttaatctagactatcttgagtgtcagaaaaattataagaaaagtatagacatgatctatgaagttttctcttaattatgggaaaaataagtattcaaaatgaattagattgatacttttactaattaaaaacaaaatgagccaatgagaattaagataaaactatttaagaaagtctagatcaaattttaaaaaatgctactaaaacctaaactagtttctaaataaatttagaatattactcacaaagaaacaattggaattagattttcctaaatattagaaataattttagcctatgtaaagaatttatattaagcaaaacaaagtataagaattcctaaaatatgactactacacggttaatagaaaaactaaagcatattgtcacaaaatgaagcctagaccatgcacttcatggacaaggaagaaagctttggaaaagtgtggaaccaagacatgtggacagccaaggaataagggcaaaggcaattggaccaagtagaaagtaaactaatcattactttggctaataaaacactaaaaatctataacacctaaagcttaagaaaactacacggattgcactccaatttagctagaatccgtgcaaacaaataagccaaggaaacatgtagagtcttcatgaataaggccacttggaagcaagtgattacttagccaataaaaagccaaccaagtggaaagtaaggaaagatttttagcacaaaaaaatcttgttaaggaggtggacggaccataggtcttcaataacattttaagaagcaaattataagaggaaaggaccgtgaggtatggctggtccaaggggaatgaacgtgtgaagccttgccactcttaaagccattccaaaatatttctaaaacaaaacaagcctagttgtggaaaccactcacttgcatcctatcttcttttcattttaaccttctttatcatactttgtaccaagaacatcaaaccttaggaaactcatgaagaagtaagaattaataaaccaagctttcaagaagaagcaaggaagcaaagggctgtccaaacataaagacaaataaggtatggggagtttatgatattcaaagcttgaataagattcttataagattttgaatgataggctgaaatccttttgtgtttctttaagtatctatacctaatttgataataaatttggttggaagcatgttttgttcctaaaagtatgttgattttatagaaatgaagtcttgtacacaagatgtttgatgaaatgcctcaaagagtaaaagctttgttaaataaaataattattagaataagtgacttggtttcaaattaataaatgatgttttgaataaacttgaatctaagcttagcatatgaatattaagtgactgaaatttggtatatatcatgattattttaaaagaaagcaattgtttaatggaatatgttcctaagccttgaagtggccgaaatttcctatgttccttgaagtgtatatatgttgttttgatgctagaaattggaagagaacatgttgatttattcttagaaatatgttgactttcataaggattaaggtataagtagaattctttgaattcaaggttgcatatcacatgtttgataaattgtctcaatgaatgaattaatggaacaccaagtgtttgttcaaatgtcacaatgaactagaatagtatatagacctaaccttaagcaaccaaaagaataattaacttgaattaaataagtgactgtccaagataattaattctactttgtggccatatgttactttgttgtattaggttactgtaggatattttactaggttgttgtaaattgatttaatgttgttgtatgttgttgctgttatggttgtaattataactaaatgatgttgtatgctgttactgtatttaattaagttgtatgttgctattgctgtatttaattaggttgttgatgtaagttgtatgacatatgttgttatgttgctgttgtatatgttgctgtatattttaattagtgcggtatattttatttggttgctgtatatttaattaggttactgtatttagggttgatgtataatattaagttgctgtatgctgttgtatactctataatacgacatttaataggttgttgtatgctgctatgtattttatgatgctgtatttaattaggtggctgtatattattttatttatgttgctgtatgatattctaacattcacttgatgttgagctatgataaagattcatattatatatatcttcttaagattatttctttaagaaaattgtgggcactgatatttgtgagattgatggatgattaaaaaaatgttatagtgccaagatgagactatgagaaataaattggagattaatggtaaagaagaataattaaaccattcatgtattttcatacacatatgcctggcgggggttaatccgtggagttgacgccttgcgggggttaatccgtggagatgtgtgtcagatagttagaggaactgagtatgagcgttcagacagtgaggagtctgagctggggggtgcttcggcagtgaggaactcacgccaccgatgttgatcacatgtagtgtgggtgactttcctgtgcactactgtgacaccctgactgatcatgcaagttctggaccagtgattggggctatctgactgtggccactgatgttgattttatgataaagctgagatctcagtcatgcatcatgttaaaagatgagcatgcatttcatgcaccacatgatgagtatgtgaaatgattatttattgataaataagtggtgaactgaatatttaatttgtgtgctgtgaaatatttaatttgtgtgttgtgaaataatttgtgaatcaattggtcttttatatatatcttattcaaactatggttgtcataaacttacccgagttgtgtctgtggttgacacctgtgatgaccccaattcatttgggcgagcagaggaacagtagtaactgagcatggatggtggaatgaagaggtgcatggatgagtggaagatgtgatgttgatgttgtgatgcttgttatttgtggttcttatgtattttggactgtctgtatattattggacatgtattatgaactgtatagtggactgtatcatggactgtactcttatttataaatgaaccgtggtgaggaaaatcgtttatgttatttacataaaattagcaaataaggcgaaaagaattttcgtgaaaaatttacaactaagatcattttaatacaaagtggacacaagtttttaattaaaatcaatcaagcacgagagagtcaagagaggcgttacaatcttcatcttctacaacattaattttccctgtagagatccttgcatgtgtactatacaatgatgagcacttcttgcctctagccataatcattgaacctttagtgagcttccattgaccatcattgaatgtgttacaaaatccctcatcatcaagttttcctgttgaaatcaaattcaaacgaatatcaagaatatgtttaacatcatgcaagactaaccttgtgccattgctagtctccaagcacacatctccaactccaatcacattggccaagccatcattacccatcttgacaaatccaaaatcaccagatttgtaagatgtaaagaaatccttgcgagatgtagcatgaatgtttgctccactatctatcacccagttggtctcatgacataaaagattaattgtttcaccatcataaacaaggaggaaatctgaagtggtagtagcaacttgatcatctttaccaccttcgtcattattattatctttcaacttcccttgtttattatctttcttcattttttgacaatacttctttatatgtcctttcaaaccacaatagtgacactcaacattggtaaacttgttagactttcttcttcctttatctctgttcttcggatctcgccttttacttcttccccttctttcattaactaatacttctgactgagaagacgaagcttgtgtctttcttctcatttcttcatttaagatactaatttttgccaaatccatgctgattataccatcaggggttgaattagatagagacattctaaacatctcccaccaatctggcaaagtaccaagcaaccatagcccttgtacttcatcttcaaacttgattcccattcctgccagttgaagaataattccttgaaatttattcaagtgatcagtcatgaaggtaccttcttgatatcttaacatcatcatctgcttaatcaaaaagagtttgttgtttccaatctttcttgcaaacagttgttcaagcttgttccacaacgtttgtgcattagtctcattactaatatgattaagaacattatcatccacccactgtctgatataaccaaaaacctgtcgatgaatcaacgtccattcttcatcaattttatttgttggtttatcagtaccaaagacgtctaagtgatacttcttcacatacagaagatcttccatctttcctttctatacatgataatttgaaccatttattctacttgtattaacctccataattaatcacaagtcaacagacaaaataacacaagctcttgttaccagttgttgggaaaaagataccaatttccccttccaggacctgttatgatggtcttgcacaagcaaaaatactctatgcacaaacaataattatgcaagcaacgcaacacaatttttaatgtggaaaaccttctcaatgtaagaaataaaaaccataggaccgatttcggagtccacccaaattcttcagtatcaataaagtgagattacaaaatagtttcaacaaccattataatcaacaaacaacttcaacaaaatttgtaccaaaccatcacaagaggcaaacacacaaaataggcttttctatgaaattaatttctaccaccagaaataacaaataacaaatcccaacggtcaaattaatgtattgcaagataggaacatactgaacaaatttgagaacaatccaacggttgagaaaagagataactctttctcaatatcactgcctgaaacaagacagaacagagcaggaattctgataacctctatttgcagttgaaacaatccatcttgaaaaaatttaaatgaatgatccgaatggtcagaatgtatacacggatttgtttaaccgtttctcaaattttgaacacgatccaacggttagtgtgagagaaatgtccctcacaataacgttgcatgcttcagaaaatggtttcagaaccagttcagtttgggaatttctggtgatgctacaagcctcaattcaataaaccaaccgttagatgttaatattgttgagttacgaacttgctgtaaaagtttaaccaatatctaatggttaaacaaggagatcaagaagatttaaggatgacagttctatccttctacacatacaaattttgatggtttctttctcctctcctttttctctcttgtgtgttttcaatttaactgtcaacatcttaaaagaagtaactgttgatctattaaaagaagaaatcataatctttccttattaagctggacttgacttgggattcaagctcaatatatttcacatgaatcgtgtgtaaacatctttattattttttgctgtatttattttcaattactagatttttagaaaattacttaaaaagaatttacagtgtttagaacaaagtccgaatgtttagaaagccaaggaatagtgagctttattattattctgtgacaatgtatatttgtaatggaaaaataattatatacttcgcattactaatacagcgttttgaatcaaataccgatgacagctcttagtatttgtctattcaacaaaaaagaggtagagttgtagtttagaattttaaaattataaacaaatagacagattttaaatataatttgaaacttaaaaattcaaaaactttgtcagtttttataaaatggtagttgaataaaatatccaataagagagtaatgtggttgtttggaattttaaaattaaaaaatcaacagtttttaaatattaatagtttgaaattttataattaagaatatagcaattttaaataataatggtttacgttattcaaacttaaaaatatgaagaaaaataattatttctttatccagtaaatcaattaacaaatatgaaatatcaagcaatttaacataaaataaatacttaaattcatcctcaaatattgttgtgcataaaattgtaagaaagaaatcagtaaaatatcttttatattttagatgaataaagaacgtgtttgagtatgtgtaaaattcaaaacaataatcatttttaaataatagtgatttattttttatttttttaaaaaaaagtgaagaaaagactagtggagtagtttggaactttgaaattaaaacaagaaaacagttttaaattataatgatttatccaatcgaccaattaaaaaacatccactaatttaacataacatagatattaaaaataaatagattatcgtaaatattggagacaaaaaataagattaaaaatacaaataaacacatactgagaaaaaaaactctaacaaactaaaattaacatacgtcaatagtttaatatataaaaagagaaactacagtaaaatatcaaatttaactcttactcaaataaacaaaaaatgtgtaaaaatagacaaatattgagaaaaaataaattaataaactaaaaataacacataggaaaaaaaaccttacatataaacattcatcaaacacaaaataaattatttaataaattaatatattcatcaatacataataaaatatatgataataatatatatagtaatataaaatttaattcttttaatttgttttatatatttttttattttatatagttagtgttaaaaattcatggcattttgatttgaataaattttaacgcaaaaacatataataacaaaatataatatattctcatgttataagaaaggccatatgtccataacaaacaaaaattatgaaagggcaagtaataatgttggaattgagttaagttgaaccgaagtcgatttagcttgactcgctcttttaatagttacctcagctcaaagtttgactcaagtcctacatgaatcttttttttccagctcgaactcgacttagttcaaactcactaacaattcaatttaattttttaactcgaatcatcacatgaaccaagagtcaaaattttaaattctatacatatcaatttttttatttattagtatattttggataaaaagattgttttatttttaaaaaaggtataattgaacttattctattaactttatgaggtcacaagatacgaaaaaataacatgattaccatcaaagtatctataaataaaaactactccactatacatatataaaataatagaaaactcaaaaataagttgattcacgaatcaaatgagtcaaattatatgcggttcaaattcaactcatttatttaatgggtttaatttttatatcaaattcaattcatttgattcatgaaccaaattaacgagttgattatcaaatcaaatttttaattatttttgagttagttgattcattgtcatcctaaataggattatcaaatgagagtagccgttaggagaaaaattgagaatgagagtataaaagtgggaggcgaaagagtgcggtacgagggagaggtaaaaaaaaaaaagagtatttaaaaggttatttttgtcttttaatagtttatgctttggacaactttttgtctagtaatttcttgtgtaacataaattgtgttttttgttatccatctctttccatttgtcctttcccttgatctctaatttaaatcaaacatggaacacttacaattctggcgtccaattccatatcttttagccaatcaaaccaacctataacaaattaaagcaaaaaaatcaagtcaaacgacaaggacaaggacaaacaaaagaagcaattccaaatgtctcatacaaccatttaaatataaaacgagtctcacctaacttaaacatatatacaaatattatcaattaaaaaagattttagagctaactactacatcattgagcaatatttaagaagaaaaaaaactttccaattaaattgcggtcgacactaaactctattaattcaatgtcccgtggttgaaacttgaaacaagcggattgataacaaattgcaatctcattgccaattgtgtaaccaaaaaaattaaatctctctaatcaaagatggagcactcaaatgcacctcacatattggttttaccttttccagcagaaggccacatcaaacccatgtttaacctagccaaaattctttcccttaaaggacacaaaatcacctttgtcaacacacatcacaaccacaatcgtctcatccaatttacagacttaccctcattccacatccaattccccggtttccattttgcgtccatcaccgacggcgtgcccgacaaccttcctcagaacgagttcgaacacatgatctctccgaccagcaggtccgaggttgccggagagttccgaggtttgttgtcgaggcttgttgtcgagaaacctcgtcagtgggacccacctccttgtgtaataatagctgatgggttgatgtcaacggtttcgatggacgttgctaaagagttcggggttccgctgatcgcttttagaacctacagtgccacggccacgtgggtctcaattcacgtgagcaaaattgttcaagagggagtcatggatatgcaaaatccgggttagtaaatgtgtttgataaattataattaaagccaaatttgataaatatacttgaatataacaaccgttaatacaaatcatattatttgtatcttttaatttagtgatacaaattttaaattctaattaatctttgagtttgaaataaattattagaaagaaaatattcagttgtgtatacttatggatctccaacaaaaattaaccattacttttcatgaaaaatatgatgtatcaatactatgattaaaaaaaacttatacatgcttgctagtttaatgacaaagctgttggttttaattttttgtgacaagaaattgtactttttaacaaaatttaatagcattttgtttgaattctttttttatgttttttattaaaattgaattattattattatggtaatttttataacaaaaaaatatgttaaaaataaacataatctatatatggaagtcaaactatatgattctaatggaaaaataatactaaaacatcgatatatgcaatttcttttgattttttttcttatactttttgttctctctttcaatatatatgttctttttatcatttttttgttagtgtttagtatttcacaattattttagtaaacatattcaaatttcttttaattgcttattttcaaagtattgactgagtacaatttactcttagtcatactgagtattaacttaattatttaattttctgaattatcttttatgactatgaatattaatttgattatgttagcttaattccatggaagttgtaatttttaatttttttggtcaagaactcacgtacacttgtatagtgaaaccgaaagttcaagaaaagtataaatcttgtaagtttcttggcaattttaatttctatttgttctgttcatgatgaacagaaatgtctagtaaggatggctggataattgatataggatcagactctctctttctgaagatatttatggaagtgaaatacttcaggcgataagatcacgatgctagaacaagaacaccacaattgacgtggggtgtgtgcactgtgtaaaaggaaaagagagagtaagagttgtgtgtaccttgttttctaaaaatatccctatttataatcactgacctgtgtgttagttggggaatatctctccataatcttggccgagatctttggtttgttggaaagatatattcttcagttaccatgcagatattatcttttatttctctcgattctgctaggcagttacagtccatattcaaagttgaccaattcttaatgagtcttaatactgagcccaatctatgaatctgtaacagtttcccccagctagattgttaaggcttatggacagtcgggatgtattagtttggattaggtaacttagttcttcaatgccttgtcacgctcgattatcggtaatcctaggcgggggttgtaacaccccgtgtgcactcggcgtattaacattataattatatcagaatagtgcagcaaatataaacatatatcaataatggaagcttaatcaaaacaactatatattatatacatatatggtgaaacctgtttaatatacaaagtacatgcttttcaaaactgtacaaatatctatcaagtgtcaaaatacaggcataatcaacaaaatatgagccaacaagctcaatcctctatgcctggggttctgatcaacctctatcctgtctcaggcctcttgccttgggatctatcggctactcctgcactgtcacctgcaacaagagccccaacagaggtgagataatggtctcaataaactcagggttcttggaggtttccctctcccctggttcactcccaaccatataaacaaatttactaatatcaaatttaccattctcataccatcagccttcacggcttccctaaaaattaatagcaaacaaatcacaatactaccacatccacatgccttactagcacgaagagaatgtctatcacatggatagaccctttttaatctatctaattcctgaggggggtcatctgacaggtaccttttcttaggacttattgcctttgcctaagaagttcatctgacaggtatacttcctcagaatcccattagactctatccaatggctaaggagggtcatctgacaggtactctaccttgggacttattgcctttgcccaaggaagttcatctggcagatacatttccttagaacctcattggatatctactccgtagaagaggatctgacacgtaccttacctcagggcttattgccttttcctgaggagttctctgacaggtacatttccacggaaccttcctattctattctactggccagagaattctcctataaccacatcattatcctatcagttctcttatactcaatacagatcatacactaccttagtgttcaattaagatcaatcatcatatacgtcttatacctcaacaagacaatattcagatgcatgacatatcaaaccattaccctctttgggtacagtgaaacacaagaaaggagaacaaactccaagatcaatgagcttacctggtctcagctcaataccggctctcccggccttgtggtgactaccaccagcagtctgaatctcacgccctacattaggcatgaaatcaaatcatcagtaacggttttcaaccattcatatgaaaggaaaacactctttcctttctatatcatcctctctgtcttctaacttaatgtttatcatagcccagcttctactaggaaattcatcgaccctcagtggtctaccttagtctgactaaggccttagagtctctttaagactctgtaccaaccaattcaaagttccactaataccaaaaatcaatagttgttcaacttagtcaaaacagatatatcaacatgttttcaccgttcatttggccttatgagcaactcttgtaaaggtacttaagttcatatagatcatagtacctcccattcactcactattcttactacaacaaccaactcaactcaagccaaaacttcatcacaaatccaatttcaaggttccttatttctcagaacaacctcccgactatacttttctaaagaacctaagcctaattccagccctatcacacatgggttactattcaccccattacccattacacaaattaaacagtgaaagtttgagtttcttacctcaaatctgtcgagaaaggctggagaatcccttctctcagctttggcgtccttgaaccaccttctttcctctcccaaaactcagctctctgaagaatctcaggaaatgggtttctctcaagagttaggctggaatttagctcctaagtggttctagtcatgtttataggtgattaggaggtgtttagatgggttatgatgaaggtatggagcttctatagctcagccatgactgcttggccagaggaagaagagaaatagtggttttccctctcaaaaatgcgaaatgaccttttatacttggccagccagaggtctggcgctgatcgcgccacctctggcactaaccgcaccaagctccaccgaccttgtggcgccaaccgcgccacacccgcgccaacaacgccaacatccagaacctgtggcgttacccgtgccaaccttggcgctcctagcattggctgccaaactatggcgccccaggcgtcaacctccagagactctagcgccccatgcgccaacctggctcccttggcgtcaacttccagagactctagcgccctacgcgccaatctggcgcccttggcgtcagcttctagtgggtctggcgctgatcgccccaaccctggcgctactcgcaccacacttcaggcatggttttctcaacagcacatctggcactatccgcgtggcaccccgcgccatccacgccaagtctcagggtcattatattctccccccttttatgaattttgtccgcaaaatttaaaatcatacctgacaaacaactcgggatataactgtactagctcttgatctcgctcccaagtcgcctcctcaggtgttcttccttcccattgtaccttgactatgggaatggtcttacttcggatctttttctccatccggtccagaatccgtcaggattctctctaatctgaatagtgtcaggttctaccacgtgtgatggatctggcacatactttctcagttgtgacacgtggaaaacgtcatgtagtcttgacaactggggaggtagagctagcctatatgccactggtccaaccctctgaagtatctgatagggaccaatgaatctaggactcagcttcctcacacctaaggcccgttctacacctgtgaccagagacagccttagaaacacatgatcaccctcatcaaactgcaggggtctgtgtttatgatcataatagcttttctgccgacactgagctttcatcagcttgtctctgatcatccgaatctgctcagaagtctcctgaaccatctcaggtccaagaagctgtctctcacccacctcagtccaacatacaggagttctgcacttccggccatacagtgcctcataaggtgctatgcccagactggcatgaaaactattattgtatgagaactctaccagaggtaggtatctgtcccagctggtaccctgctttaaagcacacgctcttaacatatcctccagagtctagatggtcctctatgtctgaccatctgtctgaggatgataggttgtgctaagccttagctgggtgccaaaagcttcctgaagtgcactccaaaatctataagtgaactttgggtctctgtcattgatgatactctctgggactccatgcagtctaacaatttcctggacatatagttgagctaatctctctgttgtaaagtcagtccggacaggcaaaaagtgagcagacttggtcagcctatccacaatcacccagatggaatcacatccagtttgagttttcggcagtcccactacaaagtccatggaaatgttatcccatttccactcagggacctgtaaagcttgtagtaggcctgttggtctctagtgttcaatcttcaccttctgacatatcagacactttgttacatactcagctatgtctttcttcatccctggccaccagaatccctttttaaggtcttggtacatcttgctggcacctaggtgaatgctgaattggcttttatgagcctcagccagaactgcatcaactagttcgcccttaggcaccacgatccggccttggtataacaccaattcatgattatcccaagagatatcccgttgaccagtcatggccctcacatcatcatcatgtctctgggcctcccggatcctctgaatcaactcattctcaatctgagtctttctcaactccagaccactcgtgccctctgttgtcgttaggtgcatatctccgaattgctcaattagtctgcaatcagagatcatcatacaggcaacactcacatgcttcctgctcaaggcatcaaccactacatttgctttacctggatggtatttcaactcaaagtcataatccttaaggaactccatccatcgtctctgcctcatattcaattctttatgatcaaacagatatttgaggctcttgtggtcactaaacaccaccaacttagcccccatataagtaacgcctccacacttttagagcaaacacaatcgcggctaactccaaaacatgtgtggggtaattctcctcatgtggcttcaattgcctagatgcataagaaaccactcttttttctcgcatcaacacacaaccaagtccctgcttggacgcatcgcaaaacacctcaaaacaaccctcaggatcaggaagagtcaaaactggggctgtggtcaatttttctttcagtctcagaaaacactcttcatattcaggagtccaaacaaatgggttaccttttctagtaagacgagttagaggtaacaccatctgtgagaatccctgaatgaacctccgatagtaacctgctagcccaaggaaactacggacctctgagacgttcttgggcctctcccaagacatcatagcctcaatcttactgggatcaattgctaccccggttgcagaaatcacatggcccaggaatttcacctctgatagccagaactcacacttagataacttagcgtatagctgttaagatctgcagaacgatcctgaggtgttcagcatgctccgcctctgtcttggagtagatcagtatatcatcaatgaacaccaccacaaactgatctagaaatggtctgaataccctgttcatataatccataaacactgcaggggcatttttcagaccaaaaggaatgacctgatactcataatgaccttaccttgacctgaatgcagtcttcggtatgtcttctggcttaatccggatctgatgatacccggatcttaggtcaatcttggagaacacacaggctcccatcagctgatccagtagatcatctatgcgaggcgaaggatacttattctttatagtcaccttattcaactgcctgtaatctacacacgaccggatactcccatctttcttattcacaaatagaatcggtgctccccatggtgacacactcggtctgataaaacccttggacaacaagtcctcaagctgtaccttcagctcctttaactctaaaggagacgtgcggtaaggagctatggatataggtcccacacctggaaccagatcaatggaaaattctattcccctatccggtggaagctgtggaatttccttggggaaaacatcaacaaactcgctcaccaccggaatctttaacatatccaaccccggtttctcaactactgtactcaacaagaaatatccctgagctcccctctgtatttccttgcgaacttgcaagactgagagaaataaaatggaactcaagctggctttatccgagggcactacaaccttcttatgacagcagtataacataatgccatacttggccaaccagtccatacccaaaataacctcaagggtaggcatcgccaaacaatacagatcaacaacatattatctgccctcaaactgaaaatgcacatctttacagcatatatctactctgcattactctttagaggcagtagtgacctccataggaacaggaagcttgaacataggcaagttcagtccttgtgcagtgcgatcactaataaaagaatgagtggccccagagtcaaacaagactctcacatcatatacatcaatcaaaataatacctctgatcagatcaggagccctggcggcttcttcagcatatacagtataaacccgacctgtaataggtgctgctgatatcactggggcagctaccgctcgatcgctcgcctgcggacactctggcatagtgaccaggctggccacatctataacatgtcaactgtccggtgcagcacactcccagatgatttttcccacagttagcacacttgggaagtgtagaaggtctcgggggtactcttctcggattgaggcccttcttaaatctgcctgttgtagaagaaacccctaaatctttgcccttgcccttcccagtaggacctgacccactgggtctcttcatctcctgtctctcagtaggggtggaatggcttccactgcgcctcctgatcatgtcctccacctggcggcactgtctcactaggctgcccagatcttgggacccactgccggctatcttctcttctatattctgtctaagtcccctctggaacttagcagcaagaacctctgcttcaggtagagccctcctaaaatgagcatacttagccaactcattaaacttggccaagtactcgtccactgacatcttcccctgaacaaggctctcaaactcagcctgcttctgctctctagcatctctggggaaatatctatctaggaattgggcttcaaagacctgccaggtgatgacctccccctggcttctcaacagccgtgaggtggtaacccaccactcatgcgcatccccctgaagcagataagtggcatagagaagcttctgatgatctgagcattccatcactgtaaaaatcttctctaatgcctgtaaccacttagcagcagcaatggggtcatactccccatgaaaagagggaggatcatgcttacggaaggcaataagcatccttcctctagtgactgaatcctcctttgtatccgcttgggacgacctgtcccctctctggtgctgaggcccaccagagtgatggttacctccaccttgatggtgactaccctcgctttcaagagtagactgtataggggatactctatcttccctacgtcgagctctcaactcagccatgagctcttcattagtctttagcaaggcttcattggcatgtctgcttgcagcaagttcctattgcacagctgccaaagcagctacaattgggtcgggttgccctttcgcacccgccctctcactggtgttctgggtcctcaccatgacactgcacatatcacacaacagagtgagttgattaggctcacacttaacatcacacatgcaataatcatgctgtacacccaaaacatatagggaaagcatgtaattcaccatatatatatatatatattgcttccttgtacactgctctgataccataaaatgtaacaccctgtgtgcacccgacgtattaacattatcattatatcagaatagggcagcaaatatgaacatatatcaataatggaagcttaatcaaaacaattatagattatatacatatatggtgaaacctgtttaatatacagagtacatgcttttcaaaactgtacaaatatctatcaagtgtcaaaatataggcataatcgacaaaatatgagctaataagctcaatcctctatgcctggggttctgatcaacctctatcccgtcttaggcctcttgccctgggatctatcggctactcctgcactgtcaccagcaacaagagccccaacaggggtgagataatgatctcagtaaactcgggattcttggaggtttccctctcccctggttcactcccaaccatataaacaaatttactaatatcaaatttatcattctcataccatcatccttcacggcttccctaaaaattaatagcaaacaaatcacaataccgccacatccacatgccttactagcacgaagagaatgtctatcacatggatagaccctgtttaatctatctaatgcatgagggggatcatccgacaggtaccttttcttaggacttattgccttttcctaagaagctcatctgacaggaatacttcctcagaatcccattagactctatccaatggctaaggagggtcgtctgacaggtactctaccttgggacttattgcctttacccaaggaggttcatctggcaagtacatttccttagaacctcattggatatctactctgtagaagagcatctgacaggtaccttacctcagggcttattgcctttgcctgaggagctctctgacaggtacatttccacggaaccttcctattctattctattggccagagaattctcctataaccacatcattatcctatcagttctcttatactcaatacagatcatacactaccttagtgtttagttaacatcaatcatcatatacatgtcttatacctcagcaagacaatattcagatgcatgacatatcaaaccattaccctcttggggtacagtgaaacacaagaaaggagaacaaactccaagaacaatgagcttacctggtttcagctcaataccggctctcccggcctcatggtgactaccaccagcagtctgaatctcacgccctacattaggtgttaactgaacctcgcataaaactcagagaagcgattagcaacaaaaattccaattacaaagattaaaaattaatgtaaaaactgtttaccaatccccggcaatggcgccaaaaacttgttgcggaacccgcacactacggcaagtgcaccgatcgtttcaagtaacaaaataggtaagtgagtatcgttctccacagggattggggtgaaattcacagtaattataagtctcagtaattagaagtaaaaaaaaattattttaaaagaattgttgttgagttggttgaagtgttgaatataaaattgaaattaaaataaacagtaaaataaattgaagtattaccaatggaagaaacaattgtggtgaggcgcaatccctaatgttccctacctctttcacttaactggtttatcaagtttgatcactcaatgatacatcttttctattttagtaaattctaattccttagcaatttaaccctttaacaacaatcctaattccttagcaattcttgtcaagcatgtaaaagactatagcatgagggttgctatttcctattgctcagagaataaatcttttctactttagttaatccctaatcccttagtgaactaaccctttaacctgaatcaaaaacccaattccttggtgaattctatcaagttaagcatgaaaaagactatattataagatttcgcagccacgcatccctatccctaggtaatgaataactgttattttactaaggtcagaaattagaatcccaacgtccccattgcgaatcctaaccctcaatacctaaatagaatgaccaattctaaataagaataaaataatgaagaacagagtaaaataaaacaataagaattctcattcaataccagtcaagttacagaggagtttagatcagttcatggccttcccacaatacaaggtttagcctgccataggcttcaaagaaaccaaagctgtcaaataacacatgattctgcattgacctagccttgattcttgacttctaagggtttagaatgatggagggaagtgtggagatgatgttggatgatatccagggtgtctttcttcagtccagaaggctttcttttatagatgaatttaattagagtaacaaagcctctttctgtgcccaatttcgaactcaatctttttaaatcaggaaatagcgccttcgcagcgcggctcgcacgggttgcggcgctgatcacgccagcagttcgaatccatggcgctgatagagttgatgtccacgcggatcgcgcggagtcttcgagttgaaaagctgatccaggcatctggcgcggatcgcgggggatgtggcgctatccgcacggagcttgcgaattgatgacgctattggcgtggcttctgacgcgaatggcgcgactacttcgagttgaatgcctggcttttctatcatggcacgactcgcgcggatattggcgcgatcctcgcgatactttgaaccttgttttcttctttatttggctttaaactcctcttttggccctgaaatacatactttagcaaagaatgagatataattgaatatgattaacaattaaactaattctaacctatattcctatttattcaattaaattctaacctaaaactacgatgtgtttgcaacacatcattaggcatgaaatcaaatcatcagtaacggttttcaaccgttcatatgaaaggaaaacactctttcctttctatatcatcctctctgtcttctaacttaaagtttatcatagcctagcttctactaggcaattcatcgacccttagtggtctaccttagtctgactaaggccttagagtctctttaagactctataccaaccaattcaaagttccactaataccaaaaatcaatagttgtttaacttagccaaaacagataaatcaacatgttttcaccgttcatttggccttatgagcaactcttgtaaaggtacttaagttcatatagagcatagtacctcccattcactcactcttcttcctacaacaaccaactcaactcaaactcaaacttcatcacaaatccagtttcaaggttccatatttctcagaacaacctcctgactatacttttctaaagaacttaagcctaattccagccctatcacacatgggttactattcaccccattacccattacacaaattaaacagtgaaagcttgagtttcttaccccaggcgtcaacctccaaagactctggtgcctcacgcgccaacctggagctcttggcgtcaacttccagagactctggcgccctacgcgtcaatctggcgcccttggcgtcagcttctagtgggtctggtgttgatcgcgccaaccctggcactactcgcgccacacttcaggcatggttttctcaacagcacatctggcgctatccgcgcggcaccccgtgccatccgtaccaagtctcagggtcattataagggtattctgtatgtcaaggccctaggatagctagggtgtattctatgttgaagttcttgtacatcacatttgatttctttgttgaagttcatgtacatcacatttgattgccattcgggtttcggggtttatctgttttaacgacaggtttttcccataaccggaattattatgagagaagacacacacctttagatttttgataaatgaactcaaaacactttaagttctcttcaatgaaatcagacataattttgaaattcattttcatatgaactcaaacactcttagaattctattcaatgacttggtcaaagttagaaatatctaatgcagagtctgcttgaatattcatttggtattaaaaaccaggtattatattatgcgaaggttttctccatattacatttcagctcatactacaagaatttaatccggacaaggacaatctgtcacatgttcaatctcaatttttcaccaagaccttaaacattttaacctgatcaaggtcatcatgacggttcaccttcttagcccagaatacaactttgatacatcatacacatgaaggtttatttttatacccccattttatcattagttgaaggttttaactagacccttaagcaatcaattcttgagtttttaaccctttcttgggctttaccctcaagatttcttacaacttaagtttttaaccaagttcgaattttggaagcgtccttccttattcttcaaacccagccccgattttgaattttagaagcgtccttccttactcttcgaacccaacttctttttggtgtcttacatataagcccgactttgtttgccatagcttttccatttggctttgctgatctttggttaacaacccagcttcattcgtcgacatttctatattgactttattgccgcttgaggcattttcttgccatttgatttgtgaaccatttttatcccggaggaccaacacaccatttatattccggatggccagaatatcatttatatctcggagggccagtacaccatttatatcccggagggttggcacaccatttatatcccggagggtcggcaaaccatttatatcttggagggccagcataccatttatatcccgaatggccggtaaaccatttatatcccggatggccggtataccatttatatcccgaatggccggtaaatcatttatatcccggatggccggtaaatcatttatatcccggagggccagcacaccatttatattctggagggtcggtacaacattttgactttttttgaagttttatggttacggaaaccaattttacctaattgaaggactttttaatttgggccccacttcttttgcagtgcctttcttatatgaatctggtttcatttgtcgtggtcttttaatttgagctggctttctttataatttactaaaaaaaagaatgtcgacattttcatttgatatttggggaagtagcgttcgcttcttttctcgagctcggcttgcctcggttattctttcaatttggccttttggacctaagccttgtattgcacttcatctttaattaaagtctgaaacattgaacttaatatgccaaacacaattgtcccaccaaggaatatgcattactttcgtaactgctggaatcactgattgcttttttcactttactttcttcattggtgcaagtttaataatattattctacaacgacattagaacgctcaataatcatatgccataatgcagcaaattaatatcaagcttcataaattccacatgcatatacatggataacatatgcaaagtaacttgagatataattcacttatctcattatcatgattcacttgaatggagcccatcatccaatttagctaacccagatcagcaaggtttatttgtctttcatttgtagccaccaaatgaatttgcctccttgttaattttcttaacactttcttttccttgtgttgaattgtgactcgaacaatcttcattttgttggaaaggtaacgagagccttcccttcattatttgacattcttgtattatgtggtttcatattttgtccaaacatagttgttgtgcaaacaacgctgcaagaggctagaaaaagtttgctagcttgtacttcaaattcgattggaccgacttgttgaatatatgaagaagtttcgcatgtatcatgtcctctccatgtcaattgacgttttgttctgaaactgcaatccaaacaataacaataacatggataataatggtaataacaatgaataatttagtactgccctaggaatgaagcataaaattgctctcttttaatcctggatagggagaactcttccggattcctgcaaatatttaaccgggttcctgccactatcgatatcaacatttgctttctttcggattcctttgctcttcccaatgatactgcatataatccagcaatttctttttctttgcctctctttcttgattttgccagtctatattatggtggaaaagcgatatatgaacgctttatttccaatcgacaatcacccctattcatatcgttatcttccagcatcttccaaacaattttccacgaataggttacactggccgggtaaaggaaattgtcagattcaatggctggtcaagttagcttccactctctcccttctcgggtatcattgtccttgtgaagaatatccggtgattaatcacaatactgtagatgattaaaaacatattttccacaaatgtattgcgaaaaataactggcttgaatagttattataaatctatcataaagattatgttcttatacatactaaataaaattaattgttccaaaactgtaatgacaattattgtataattgactaaaagcaccattcacatcatggtgcattataatagttattatagaaacttcaaaaacacatacattgattcatgggttggcttcgtatataaactcaaaattataagttatctccataattcttaaaatcacggtgcattcaacacagatcattttcttggtgcaataagggtaattaggaattaatgtcagtttcataacgctagcactcttgatcacattaattgacttcaaaaattcattcatttaataatcataaatttattaccaacattaattgattaatcaattttttatagtaattatatttgagatgcaaaaaataataatattttacacatatattattataaaaataatataaagaatgatttctgacgcttcatattagaaaagggggagaagacttagcttttgcttaatctaatctctgttgccgctcgtgaaacaagattcaccctcataaagtgatattgcgtatatgacaacctggcttccttggtggtgaatctcacattctatattgatgaggctgccttcctgtcctctgcacccatcatattaggattctgatttgcggttgttatgctttcaccattattgggtgggaatcgaattttatcgtttcccaagggcccatcatctgatttagcaacgcggatgaaatctcaactggactcattgcctcgtaactgtatgtccggattggcttctatttgtacaacattccttgattctcattataagtcgggttctccatgttcctccatttgaagcgctgctctataagctgggaaaaccttctcaatgtgagaagtaaaaatcacgggacctatctcagagtccacccaaattcttcactatcaataaaatgagattacgcaaggggtccgacaaccatgacaattaacaaacaatttcaacaaaagttgtaccaaaacatcacaagaggtaagcatacaaaataggcttctgtacgaaattaatttctaccaccagaaataataattaacaaatcccaatgatgaaattgatttaatgcaagagaggaacacactgactaaatttgagggtaatccaatggttgataaaagagataaccctttctcaatatcactgcccgaaacaagatagaacagagcaggaattctcataacctttgtttgcagttgaaacattccctcttgaaaacacttcaatgaatgatccgaacggtcataatgtataaagatattttttcaatctttcctcaaattttgaatatgatccaacggttagtgtgagaaaaatgtccctcgcaataccgttgtctgcttcaggaaatagattctaaaccatttcgatttgggaatttctggagatgctataagcctctattcaagaaagaaaccattagatgtgaagaggaatgagtcactaacattttttaaaagtttcaataaaatctaactgttaaacaaggagatcaagaagattgaaggatgacagtttctgcccttctcaacatgcggatttagatgttctctttctcctctccttttttccgcatcagagcgtgggtgtgcggcctaattgttacttcttgtgtttaccatcgggaacgtgagatttgaaatttaacgtccccatagacagaaccaatgttctgtttgtgatgaacagaaatgtctagcaaagatggctggataattgatataggattagactttctctctgaaggtatttatggaagtgaaatacctcaggagcgaagatcacaatgctagaacaagaacaccataattgacgttgggtgtgtgcattgtatgaaaggaatagagagagtaagagttgtgtgtaccttattttatgagaatatccctatttataatcacttacctgtgtgttagtctgagaatatctccccataatctcggccgagatctttggtttgttgggaagatatattcttcagttaccatgcataccatgcaattattatcttttatttctctcaattcttctaggtagttacagtctatatttagagttgaccaattcttaatgagcctttatattgagcccaaattatgaatccgtaacactattaatttagaagagtgaaacaagaatattacacacatttaaacatagatgttattaattttataatatatatatatatatttcggttgaaattgggaaagaaattttttataggttgaaatttaatgaaatctggtgataattagcagaatctttcttcaattcttgatgattagttttgttaacacattacttagattatgcttagaagtttgacgattacgtgatggacttaaaatgcagaagatatggataaagtgctcacaagcatcccaggattggagaatctactgagagaatgtgatcttccatctattttaaaattgaagccaggaagtctttacattgatttctacatcaaagaaaccttgaccatgactcaagcttatggtcttatagtcaatacctttgaccagctagaagcccccattatcactaagctaactagtatattccccaaagtatacaccattggtcctatccacactcttaccaaggctcaattcatcacaaacaatagttcatcatcccttcatttgagaaaagaagacaaaagttgcataacttggcttgaccaacaaaagggaaagtcagttttatatgttagttttggcactttggcaaaggtgtcacatgagcaactattagagatttggcatggtttggtgaatagtttgaagcctttcttgtgggttattagacaagagcttatcattggagaaggtggtttcggtcacaacgtgcctatggagcttgaattgaggaccaaagaaagagggctcatggtgaattgggcccctcaagaagaggttctagcccacccttcagtgggtggattttttactcattgtggttggaattccacattggaatgtattactgaaggcgtgcctatgctttgttggccattgatagctgatcaatcagtcaatagtaggtgtgtgagtgagcaatgggggattgggcttgatatgaatggaatctgtgataggctaattgtggagaagatggtgaagaatttgatggagagtcaaatagaaagactcacaagctctacaaatgagattgcagaaaaagctcgtgatagtgttaacgaaaatggttcctcttttcataatatagagaatttaatcaaggacatagggacaatgaaggtaaggaaataatactatatgagtaaaacacattttttagatgaacaatgatgacatttttattttcgtaatctaaatattgctatgtaataatttttaaatttaaaacctgaatatgttttatcattaaaaatataatatatattttcttttggttcccttattttgggtatcttatttatttttgcttccaaacatataaaaataactgaaatatacaattttatgttagaaatatattctcacatagtgaaaatattgttagttacaactattgatgtgaatagttacaactattcatgtgaacagttacaactattgatgtgacccaattaataattaaccgctacaaaacggttacaaaatgcattgatctcaagcgttggtatggtatatgatggacgtaccagattaaagacaattatgtataaatagggttggttctctctccccttaaaaccaagtgttattcttccatcagaaaaacacaaaatagaaaagaaggcttagagagagaaatcaccctaccggtgttggtaaagaaagagatggctgttactccatcatcaacgcttccgggtatgtctttatccttcttatattggtgaaaatcatgaattcccaagatcctttatcatgttcttgctttatgttttatgaacatgatatattatgttattctaacatgtggtatcagagcacttgtttaggaattcatgattttccttatatgatgattgaatataaatgtttatttgtcatatgcgtatctgtttgaatcctacggacggatcaattggtaaacatgatgtgtatatgagtttggtactatttatgtatatattttatatgatgtgttgctccctttgtaaaataaagatttataattataagtttacgtcaccaagctttattttacaattggatgataaaatggttgttgggaatgatgactttaattgatgataaatatttgtaccaaaaattatgtattgttgattaatgaagtatgtataaaggcatgacttccgctgtatataatattttattttaaaatatttattgatgaattatattatgattatatcatgaaattatttgattagttattttcacgcattatgtcatggtttgttagtcaccaaagtggccaaactagaagtgtgaaaataatatgatacttatgtatttgcatgcattatgattataatttgttagtcaccaaagtggccaaattagaatgttatcgcatgcataaagttgtcatttatccatgtacttatgaaataccaataattgaaataaattggataaattgacgttgctaattattggaaaggaaggattcacccaaaggagaatcatattctataattagtgacattatgtggtaaattaatattttaattaaatatattttgattatccaaagataacagatatatatttaattgaaaatatgttatgcctattaatgttatggtatttaattatgtttagtatattatagtaactacccaaaggagtgttattttatactggtatgattttatttgaaccacaattaagagcatatgttattattgcggctgttttcatgaattctcatgcattatttgttactatgtttattggtgagaattttctgaatggtgtgaccaagtcaaattccacttaggtgttatggatcttgacttggcactccttgaggatgaatccactgctattattgaaaccagtagtgaggcagaaaaattacacaataaaacatggaagcaaagtaacaggttgagccttatgtttattaagatgactgttgccaacaacattaagtcaactattccacaaacagaaagtgctaagaaatatatgcagtttgtggaagaatgtttccgtttagcagacaagtcactcgctggtactcttatggcacagttcacgaccatgaagtttgatgggttgcgaactatgcaagagcacattattgagatgactaatcttgcagcaaaactaaagaccttgggacttacggttgaggactcattcttggttcagtttgttttgaactcgttgcctcctgaatatggaccatttcaaattaactattacactattaaggataagtggaatgttaatgaattggccagtatgcttgtttaggaagaaggacgattaaggaatcatgcgagtcactctattaatctcatgggtcagaaagctaggaaaggattaaaagtaaagtcaagacactttaagaaaaagaaaggaacaaaaggacatcaagtgccacttctgcacgaagtttggtcactatcaagttcaatgtcctaaacgtatggcttggttcgaaaagaagggtaattatttatctttcgtaagtttcgaatcaaatttagttgaagttcctaataacacttggtggcttgactctggtgctacaactcatgtttccaacaacttaaagggattcgttacgatccgaactataaatccaaatgaagatcgttttctctttatgggaaacaaaaagaaatcttcaattgaaggcatagggacttatcgtctggtcttagaaagtggctatcatttagacctattacgcaccctttatgtgccttcattgtctagaaaccttatttctgtttctatgttggataataatggctttaagcttatgtttggatctggagttttcaatttatataagaatgctgatcttattggttctggtattcttatggatggtttatataaattgaaacttgataatgtttatgccgaatcactacttaacattgttttcaatgttggtttaaaacgtggcatcgagaatgaaagttctgctttcttgtggcataaaagattaggtcatatatctaaagaaagaatcatgagattggtgaaggatgaaatttttccaaatttagatttcaatgaccttgagttatgtgtggattgcattaagggaaagcaaaccaaacataataagaaaaacgctacaagaagcacccaacttttagaaattatacactatgccagacacaccacaataaaatggtgtagcagaaaggcgtaatcgaacattattaaatatggtaaggagtatgatgagtaactccacactacctagaaatttgtggacttatgcgctcaaaactgcgacttacttgctaaataggattcctagtaaggcagttcaaaagactccttttgaattgtggacaggaaggaagcctagcttgaagcacctgcatgtttggggttgccaagccgaagcaagagtttataatccacatgaaagaaaactagactctcgaactgttagtgggtacttcattggttatcctgagaagtctaaagggtatgtgttttattgtccaaaccatagtccgagaattgtagaaactggtaatgctagattcattgagaatgacaaagttagtgggagttctaaaagggaagttgtggaaataaaggagactttggtaaatattcatttgcctgtaattgttcctccttgcacaatttcacctaatgttgttccaatcgttgtagaacatgatagcaatgatgaacaacatttgaatgaaacagttctcccgaaagatactaacttgcaaaatactaatgcacaagaaccacaaggaatagaattaagaagatcccaaagggaacgaaagtccgctattccgaatgattttgtggtttatttgcaagagttagatcatgatgttggaatctataaagatccagtttcgttttcacaagccatagaaagtattgaatctgataaatggatagaagttatgaaggaaaagctaaaatccatggaacaaaacaatgtctgggaaaatcgttcaattaccaaaaggttttaaaagagtcggttgtaagtgggtctttaagacaaaatgtgactctagtggtaatgtcgaacgatataaagtcagactcgttgccaagggttacactcagaaagatggcatcgattataaagagactttttcacccgtctctaaaaggattcatttaggataattatggcattagtagctcattatgatttagagctgcatcaaatggatgtgagaacaactttccttaatggtgatcttgaggaagaagtttatatggatcaacccaaaggtttttccatggaaagtgaaagaaagttggtatgtaaacttaagaagtcaatatatggacttaagcaagcctcccgacaatggtacataaagtttaataccattgttacatcttttggatttaaggaaaacactgttgatcggtgtatataccaaaggatcaatgggagtaagtttattttctagtctatgttgatgatatcttacttgctgcgaatgatttatcgatattgcgtgagactaaagattttctctcaaagaacttcgaaatgaaagatatgggagatgcgtcctatgtgataggaatagaaatatttcgtgatcggtcacaaggattgttaggactatctcagaaaggatatattgagaaggttcttgagagattcaatatgagtaagtgttcacttgggattgttcctgtatagaaaggtgataaatttagtctcatgcaatgtccaaagaatgatgttaaacagaaagagatggaagtaattccatatgcttctgttgttggaaagctgcaaattaagaaagttttaaggtactttcaaggcacgaaggattacatgctcatttacaaaagatccaatgaataggaaatgattggatatgcggattcggattttggtgcatgtcttgatagtagaaagtcaacttttggctacttgtttatgatggctcaaggagccatatcatggaaaagtgtcaaacagactatcgttgcttcatccactatggaagcagaatttgtggcgtgttttgaagccatagttcatgcattatggctgcagaactttatttcagggcttgcggttgtcgacaccgttagcaggccgctgaaaatttattgtgataattctgcagcagtattcttctctaaaaacgacaaatactctaaaggtgccaaatatttagagttgaagtattttgccgttaaagaggaggttcagaaacaaagagtgtcaataatgcacatcaaaattgaacaaatgatggcagaccctttgacgaaagggttgcaaccaaagctatttaaagaacatgttgaaagtatgggccttggttgtattaaagattattgatgtgtgacattctgagctcacttatgtgtttctgacaatacattatgttttcttgttatcttatggttgtatatacattatgaaatctaacaagaaagtctttgtaagacattacgtggaccattatatttcctatatattatgaatgatatatgatgagttgttgatggcgtagtatatatggaagggaatgcgttgaattaataatgcactaccgccataactcgcattttacaacttatcattttatgatggtcaatgcaagagatgtattgaacatgaatattatgattaattgggccaagtgggagaatgttagaaatatattctcacatggtgaaaatattgttagttacaactgttgatgtgaatagttacaactattgatgtgaatagttacaactattcatgtgaacagttacaactattgatgtgacccaattaataattaaccgctacaaaacggttacaaaatgcattgatctcaagcgttgatatggtatatgatggacgtactagattaaagacaattatgtataaatatggttggtcctctctccccttaaaaccaagtgttattcttccatcagaaaaacacagaatagaaaaaaatgcttagagagagaaatcaccctaccggtgttggtaaagaaagagatggctgttactccatcatcaacgcttccgggtatgtctttatccttcttatattggtgaaaatcatgatttcccaaaatcctttatcatgttcttgctttatgttttatgaacatgatatattatgttattctaacattttatgcctaaatgcaagtgtaagaagataaaatttaatgtgttatgagccaacacaacatttatggttatatttccttatacaaaatttgcctcgtcgacaaaggttattgtcaaccacatgaaattgacaaccatgaaaccttcaatccagtagtaaggtcttaaacaatcaaattgtatatatattatattacatttttattttaaatatgtaattacgctataatttaaaatagtttattttgatatttcatttcgttttatatgatatatagtattttttaactatattttaaaagtaaagaaaaataaacccgagcattgccagaatgtataatacttgttaactttacatcaccaatatataacagtataagataattaacacaatgttagcaataccaatgctatcaaactattctagagttcaccaaaacatgaaaaactattctagaacttattgagtcattaatataacattatttcctaggacctaatatctaaatggaaagactacgtgagattatgagaatgctggggtgggcatgggccaactccaaaccaagatcgacccacaggaagtgagcgaggtttaaaataaagtttaaaggaaaatttattactttaaataaaaattatatgatgggcctttttcgctaacatacatatatgtgatctttcttgctaatatataaagtcttttgtactttataaaaattatgaacaaatattttttttagcctaaaacttgagtttctttgtcctaggacagccttgctccgaaccaaagaggagaaacttggctcttgactggtgagttggatatcctccatgttagtctctttcttgtacacataaacttcccatgaacatacagtcaagtcagtgttacaataaatctgtatggtcttccaatcattaccaatttcaaaatttacatcctccaaactcaataaaactcgtagatcgaataacaacacgtgattgtcggcaacatagaaatcattataccgtttgtgttcaccctccatcaacaagtgcatgctaactgatgatctagccttggcattcacttccacgaacacaaacgctaaagcaaccgcatggcacttcacacgagccttgaaaaccggaaacctcccttgttcacatagtcgaccattctggaatctcccttttcggcatcttcacttctaatcccctaatttctttatgcacatgcattgatagaggtgtttaatgatcttttacatgggattggaggtcatatgacaagatccaagattaagaggatgaaataataaatattgcaagagacttgattctaactatcaaagaaaaagaagactaatatgaattaaagactacatctaattgggtcactttcctacgaattgataaaaatgttttgagaccaacttgaagaattactttgggaagcctaatttacaagacaagaagcattcattggtggatttgatcaatttttgtggactattaatattggattgattagataataactaagtccaatttctgtcgttttatttataattttcgtactagttttttggctgaaatttctagtgaatttttattttcttagtcttactaaatgttttctagaaaactctaggtcatttagtggttagttggaatttattttcatgtttattgtcatttattttcatttagtggcatgtaattatcaatgcaatttggtaaatgcatattagtggaaatttattataacatttcaatattaacctataaatagggaactcttgtactcttcaaaggcagaatttgaagattaatgaaatttgagagtttatctattgtgagagcttttcatttattcttggttaagaactcgatagttgattctatcgacaagtcacggttagggtcacgctcattttaataactttggttatatcagcacatcgcggttaggatcaagttcctttgttttataactatttttaagataatcctaagtattctcttatcatgcatgtatcacatccatcccataaacaataaataaatttgacagtcccattgtaaattatatatgtttatgttctatatattataaacactttgctttttttttcattaagaataaaataaaatggaaatgaaattgtgaaactacaccgaaaaatatttcataacaactaagatattaattttatcaatttttaattaaagaatatatgttagtcttgtaaatatgtatcagctaaagtagtgctagtaaacctgagaccataacatgcatgtttgatgtcttgacattttaggaattgcattctcctgcaattgctttctcaacacttgatggcagttctggaatttcttgaagctttgcacaatagctcacattaagacttgtcaacttagtagattctttgatgtgtgctgggaaagacacaaagttgttccctactaattttaagtcttccaagttaggaaaattgtaaataatcgcatgaacatctttgtcgaatagatcagcagtttcgaaatgtaatatctcagttttgggcaagctgaataatggtttccttccaaccttctaaatgactctcgaagtccacgacattctgcaatttttaatgtgacaaaatttggcaacataaacaagctactaggcaaatgttggagtcccaaacagacatccatgtcaagatagttaagcccagtaagattctcaatggattttggaagctaagggataggtgtatttgacatatcaatcattaatggcttatccatcgttccctcaacctctgggaagtgtgcaagtcttgtacatgagttaaaggaaaagtattcaagagatagcaaatactttgttggacaaaactttggagttgagagcttcctgaagcagttaggaaaacaagattagcaagatgtccaactgacttatgtatgctaaccagttccttgcataaatcaagtctcaattctcttaaattcatggccgcagacacatcaggaaattcagtgaccataagacaatacgagatgttcatgtaactaaaatgcttaaatatttgcaaaacatacataaagaaattaaaaaacaacaacgcatccaaactatgtaaattgattttagataaagtaagtcacaatataacattcaaagatgtgcattcaaaaacggttggaggatagccatcttagttggtgaggtggtgacaatttcgtaaataatttgttatttacgaagacggttatatgacaaccgtcttagataatgtaaaacgaagtcgttttcaactgagaaccgtctttgttttctggtattcaaagatggttggtgaaaaccgtctttgaattaaaattatcctaaatgtcttcgtgctttccctttcagacttttggtatgatactcgcgacctaatttcgtgacctcgtgcatccttcctcgcgacctaatttcgtggttccctccggccctccgttgtgtgctccctgtaacgactcgccacgtcactactatatcacaactctaaacgtgtaattttcaatttttattaaaaactccgttaatttgatcataaaaattaaggtaaattttgcacgataacacatttatcaaaaacgcacatatatataaataaatacacgaatatataaaacatatacttataattcctaagtcagaacataactcagtttttttttttacatatatataaacttgagattacatatctgttgaaagaaataaggaaccaactaataaagtgttgataacgaaacacaactctctcccaaaataaattccaatgttgtcatgttggcttggtagctccaaccaaaagaattctctctccaatatcacctattgttgatcatctgctcccacaaacagaagttcgtgatcatcacaggtatcaaccacacggtacaaaagttgcaagagtgagtttattatataaacaaacaaacatcaaataacaataattgggaaaagaaacaataataacaaccacaatcattaccaaaatccatcaacctaatatacactcaacaaatcaatcattcaattcatttcacaaatcaaacaatcctgttaagaatgatgcatgctcctgactcatctattagcatgcaatgtggtaccatatcctggaaatagtcttttacaggaaaaatggttcaccgattatcaaggccatcatgtcgtgcactggccattgctctcccggtgatcagtcaggtggtcacaaaggaattccaaacccgatggccccttagtacctgagttctcaacccattgaaactcacaagtacgcgtgtgccttcattctatttccatccatgcacatgaagtatgaaacatgagcatcataaatgtatgaccatggccaggaacaaatccttcccctcaaggatgaccagtcatacaccccccatgtacatacataacactaatgtgggctcaccggtgcactgaccgtggctaggaacaaatccttccccgcaaggataaccaaccagtcattgcaccccatgtgtatatacatggcatacaaccatggcaccatcaatgtatgaccatggccaggaacaaatccttccccacaaggatgaccagtcatacaccccatgggtatccatatatatccacatcacataatgacaaccatgggcaccatcaaagcattatcatggccaggaacaaattcttccctgcaagaatgaccaatcatgcacccccatggatatcagtgtacagacacatcacctcatctcgatatcatcatcatatatatcaaattcatcttatttcaacattatcctcataagcatcaacttcatctcatttcaacatgaacatccatttcatcatcatctcatttaaatatcataaaccacatcatcattatatcatttatacatcatcattatcttattcaatcatcaccaacacatcaataacatctcattcatccacaatccccatgggactgatatttttggaaaattctaaattaaagaggagaactacaatatagaaaacacattcttatgcccatttaaaaatttaataaagaattaaatagaaaaacatattatcaaattttggacagagtatcctctctaattaagacttttcccaaaaatccaatcaattacaacaacaaaatttttcacagtttcactcatcaataaccaatatatcacatcccaatagtttaaaacatagtttttcttgaaaatcagtacacaacagggacatacatatattttcataattgggttctttgatccccccaactatgatatcaaaaactgtaacaaaataataaactccccttacctatctttgtccctttgttagcttcttgtagcgttgttttgagtctctcaagttcatatgctaatatacatgccataaaattcccatattttagtatgttaaactagactttctaaggtttctaacaaggtatcacatgccttatatagatttctaaaactctagctatagtattcttttaaaactagacttcaaagctgccagcgagttccaatttccacattgacatctcttagtgttctcgtgactgcaagcagtacacaatctagatttatctgaaatttttatgttataatctacatctagatctttcattccatatatcatacaccaaatttgagtaagaaatgagggagaaatagatttttcaaaacggatggtagaagctgttttgggtgaagacagtttcggacaacttgggttcaaataatttctgggcatgattcactactcagttgggtaccatattttaggacaaaatagaggacatcctaagctttaaaatgagtggtcaaacacctcatttggttaagtacatagggagatatgaaattctaaaaacagtccaaaattctgcttaaaaccatacgaattttaacatcaatacttaccaaagtatttggctggaatgattcaagagcttgaggagaaaagtttctatcttctaatagaatattctgtatgaataaatgataggtaatttggtaaaagggctgtagtttgtgtgagaagaagagaagagaaaatgaaagccaagagataaaaggaattgaattggccatgaggtttagaatgaagccttgcttatgcagatttttcatctcaaagagggtatttatagtagaagaattagttacaatgtaaatgaattagttaggatgtaatctagttagtccttggtttggttctaatgtaaccaagtaatcatgacataaagattttttttttatctacatgcaattaatgcaagcttacctagtcatcatgcaaatattctctttgttatggcctaaagtccacgtgcaatgcctcttgaagcttcttgattttgtttatttcatgcacataaggcattggctttatcatgaaaatcacgtatacacctacccacacaaaggtattcttccatgtttgttgattttgttcaaaatcacttgtacgtacatgccttccttaagatatttgtttcttttaatttaaaccaagtgtatttcatgtgttttcaaattgatgtaatagttactaaggtgtcatgcctctaaaatcttaagcctctgttcaatagtccatatggcttaggatttatttcttttcttaaattaactaatcacaaccaattctattttagcccttctaaacttgccacttggatccatttgcttctatcctattcttcttatacaaccatcacaggtgtttcttcatgtgataattttcctcatcatatcatcaaatggtccaaaactatatctcatgatagctttatatattcttgtgatattccttcctttttactgtaagctttattctcttgcatttattatattgagtagtaaaatttaaaaacttatcttctggcttgcttaatcataaattttttgccaataggtacttttagttttcttgtgatgtttgtctgttactaagggtatttttgcaatttccatatcaggggcatttctgtaatttcttcaagtttccacaaaatatttaagggtattttggtaattttaacctcaagaatattatggtaatttggtcactcacttcaggagtattattgtaatttccacttcataaccaaaatgtctaagggtatttttgtaattttacctcaaggggatttttgtaatttctctttttgtctctaattaacattttcacacaaaataattcaaacatagaccaaacaaacttcacataacctaacatttacaccaaatagttacacaagagtaatccacacaacatttcaaccatatattttcagttatcgaaatttcagggcgttacactctctcagtcggtggtggccaccgctgctccttcttaacgtgtttggtctagtcacgtgtatgggtcttgcgctcaacccggtttgataacattatggtattttggtttaggggtttcagattttgagggttgggggtttttgttttacttgtgttttttgatttcgtgtctaggggttgaacattattgtttcattcacattcagagtgtttgggtatgttaggtttcccaagcttatgtttttgatttcgtgtttagaggccacccaagcttctgtttttccactttcaagtttcatatgctatccaacaaattgaatggaaaggtgttactgtcttgtgtgggccatattctgtccttattaaggtgctggatacatattccagtttgtttctatgagcttaagtgtttgtcttgtgttgttttttgcttcatcaatctcttgacctgtataaacattctaagatgcttgtaccagaatgttcatacttcctagtcttcaattagcttcttagaatggaaattttataaatgaagaaagtatatcctttcatttctagggtagcacatcaaatctcaagtgtgacctttgccttgaactttgatattggttaaatcagtaccttactatttggctaaaaggtattgttgacaataattgtgcaactttatttcattcaactttatcttttattcattcatagtttatcctataaattttaaatgcaaaagttgatttttagtttgcaagagaagttcagcttattttattttttaacttcttactagtgtttatgaagaagtttgtgaagaagtttatgtaaagaggcttgggtaattgtgttgcatggatattggtaccagacaaaattagtagtaactatgcatcatagttgttcaatagccattaatttaaaatgtaaagttcatatcctttgagttttagtaagtacaaatgcacaataattgaaaatccaataattctaggtttcatacttggtcttaatttgagtgacaccgataactagtatttagcatgacataaagggaatgacatgagtcttggttttgggacacaaatcaagggttcaaatcttgaaagaataaatgaaggtccctcttccatgtcaacacaaccataatcccctctttcttcttcagccttccattcaaagcattgaatcatagcagcaagggtggtgtaagcaacctttagtgctagtgaagttccaggacaccctcttcttccattcccaaaaggaaaaagttgataatgttgtcccctaacatcaacttgacccatttttccactgtcattatcattgctaagaaacctttatggcctaaactcaagagggtcatcccagtgctttggatccctaccaatagcccacacattattgaaaacccgagtctttgctggaatgtcatatccagcaatggtgcaattcttagttgactctctcaatacaaatggagatggagggtgaagcctcagtgtctccctcagtttctccatgaatgtgggatggttaattagttatgccagtatcattctagagcaactgcaattgtgtctgtcccttctgtgaacatatcctgagaaataataaagaaagattgttaccaagagtcattatgtttatcactcaaaatcttaaaccatatttttgtcaaatttatgggttgtaaaaaaaaggtaaaatgacaagacaactcaattttcacaactctaactaattaagatgcaaagataccggtaagagtatttgcacaattgaggtagatggagttattatcacaacataacttcatctgtcctatctttctgttgttagtttttctgaatttgttttactcttttctgtttctgaatttgtaaattagatttactcttatctctaaagaggttatcagctttaactttatcttttctaactgttgttagtctacataagatgcaaccatcaaatctgaatataataattattcccttcatcgtttctctataagatgcttggctagtatggctaggttatgattattgccaatgagagattttgttaagaattgtaattgtcaatgatacactccatcatggtgtcaaatctctcatgaaccacctttagctttttcctaattccctgcagatccaaccccctacagaaccaaaaataatcttctaggttaaacattccactcaccttggaagactccttgatcctttctgtcaccttgtgagcctcatcatcatttctgaaatagctttttcctattgccattctcatcactatgttgtttgttagcttcaaaagctcatctccagcattcaagacctcacatgcttcacctttcactatcatcattaacaaaaacctgtgtatctacgaagtcataaggtggttggaagaagagcataaggattcaggtgatacgaagatcataagtttgaatcctcccattactaattatcagggatggatcaaaaaatgcatcaaagtgggatgagggtatttttaacactattatttaaatattaaattttaaataaataactaattaataattaataaatttcaaaaacatatttattattaattttatgcataaatttacagatacaacctattaaaaaaaactattactagtagaaaattgtcaagacaccaaacactattttcttatttttgttttattaatttttctttttttcacctgatataattaaagtgtccaaggggcagggctagttgttccgcatgtcctcctttatccgtccctaactacaaacacttgtcgataaaaaaaaaaaatacaaacctgtgtatctcttcttgcctaacgggtagaagttgatccaacatcttcccattgacaagctctgacatgcaaagtttctttatgaacttccagtagggtccatcaggagcaaacccgaaatcaaatgagttgtaagtgaggtaattaatagcaacatttgctagtctattggagaaggaaagatcatgggttttcaagatctctttggctatttctgaagttattcattcttagtttatcctataaatgttaaatgcaaaagttgatttttagtttgcaagataacttcagtttattttattttttaacttcttactagtgtttatgaagaagtttggaagatgtttatgtaaagaggcttgactaattgtgttgcatggatactggtaccggacataattagtagtaactatgcatcatagttgttcaatagccattaaattaaaatgtaaagctcatatcctttgagttttagtaagtacaaatgctatatatggcgttatttgatagccctgttcatgctttctacttatagttattcacagaacttggttgccatactctctaaccaataccctgctaattaccaattggatgaatgctccttgttgtatccatatggacatagtcacataggtaacttgtcttttataaatatccattagacttctgtggaagctgaatacctcctgcctcatgggatttggtgttgtatatggttatttcatatgttgaactggacttctaaaaatagttgtttttgcttccaaaacttgataaatattccattattcctcaatttaaacacatttttggatcattaagagagtgggaaaagcaaaatgttactttctgtattttcctttcaaatgagttacaggttcaacaataatatatcatggggtagacatattcaaattttcattgaaggagataatttagttgtggcttttccctatactatagtactatgtgaccaattgtattaatgtttcattcttattgaaagaataagggtaccatgtacatggtcttggttggttcttttgtcaatataacttcagatgctgtacaaccaaaaccaaattagcaattcaaattgtggcactagagtctattgttcttcttcatttcttctagttgacataagttcatttttaagtcttgttgccaagattctgccatttgtatttgtatttcttccttttgtatatccttgagcacttaaggaatttaaatattgctgctttgtgcctttagcatacccttgaacactaaatcattttttgttttctttccaggaacaactaatgctacaaaattcttaagagttattggaattacttttttaaaagcacgtgaagaaacaatagagctacttgggacgtctgacttgtttttcaccagccctgagcatcctcctttggctcaaccaacccaaataatttcaagattgggcaattgaggagaaattgaagtcaggtgtgcatggtttccactatgatgagtttcaactagtatccactgctaacaatttttacaaatgatcatctagattcattgctcagtttaagatgtccatgtttcaaatattttttgaggtatttgatgcatgaaatgaatccattgctgagtttgcgttgtcaactgttatgttgcatgtctattttgagagaaagaggctgaaatggtgaaaaattattttagagtttcaaaaaatatttgacgaatattatggctgcatataacgaagtggtgttgttgtagaatttttcttcatgatgtgtctgtttgagtaattttaaggagtaagaaacttaaacccctggttagtgataattcccatgtttctttgtacttttaagacatgtaaaactataggtgttgttgtagctcttgtccatagccaaaagtataagtaaagtgagaagaacgaaactaaatttagaaatttgtttggaaaataatgttgatccgatgctgtcttcaaactatcactattataaatccctcttatgtcgttgtagatatatctcttagatcctaaattcgatttggcaaaattttggtctgtagcatgatgtaagtgaacttgagccttaaaatgcatggaatataaacctgagatgtaaattctagttttaagaaggttaataaagtatgttacacatcaaatggtagctaataaactaggaaacataatcgattgtgtgccctggtaattcgagatgaatgtcgtctttaaaagttattcctctaatggtgagtttgatatttgtaacgacctaaatttctacttattcttgttaattttattagtacttaaagataacatttataagaagcgtatattagtaaaaattttaaaacgtaaaattttcaaaagatttgtactcatatacataaccaatgtctctgatacaaaagtttatataatacaagtatactactttctcaaaagttcagcttagtacataacttcttttatatatcttcactactccaaggcctcatagaacctgtccatcattgccatctaaaaaaaaatgaaacaaattgggtgagaaataaatttctcagtaggcaaagctaaatcccgaccctattagtaggttagtaaaatcagtcaaataatcaaacacatacacaagcaatatgcaaactatatgaatgcatgagatgaactatcccaggacaaatggctcccacatatcgtactgtatgtggccacgttgagcgtggttgctgctatagtcttacgcaaatatgtatgaattttgccatatatccttgcccatgggtactacatatcgtactgtatgtaacattagattatgtttccctaaagccttgtactggacttggaacatggaaacatgaatccacctatcttaatcacatcaatcatccatatgaaaaatcaaatgcataagcaaaacacagatcatatcatcatatatatcataagtatggttacaccaccatattttatccaataagcttttataagtatggttacaccaccataccttaatcaaataacattattaccaaacttatgcataatcagagaataaccttaactacagaaaaattttgttagtaatctaactaataatcctcaatataaataatatctaattcctttaaacctttacaagcaaagattcacacctagtatacatcttaattctcctttcacccaccaccacactaattaatccttaaaatcaaataattaatcctcaaaatcaaatcatcaaatatttaaaccattcaactccacaccattcatcctctacttcaaaaattaaatcaaaacatgtccataaaaatataaacagacagtccaaagtatcattaaaatcacctcacaagatcatcaaatggacttccataattcactaacattgatgggtataaatcataacctatcttatggcttaattcaacatattctcatcaaagaataaccttcaaatagcacgaaattcaagcctaaataataaccataatttagcgtgtaaattaatccaactcattgattaacaagagatttaacttcacgtacctcaagggagtttgattcttgatatccttctaaatgttcctagttccacgtgagattccaaagtagcaaggcttaggtttgcttttatttttcttgaaaatgaaaggtgaaaaggatgtagaatttgaagataaaaggatgaaaaaggaaaggatgcaagcaagagagatttggcacgttcacttcccttggaggcttgatgttttcagttcctactccctctatttatagtgtgaaagaacttgtttaacaagccttggccatgaaaatatcacttgttatgattacttagctttccaaatggaccaatggcaagactccttgcttttcaaccatccaagtgtccattttcttaatttttctcaacacttcttcattcttcttgatgtgcacgtggagtagcttggcttgtagagcaatcttcacaaattttcgtggaatggctagattttaagaagatttcgtgtttttcctttaccccaaaacccgttttagtaaaatagtgattctagattcgttaaccgttggatctctttaaaagtttaagggcacactaatatcttacatatataaattttgaccattgggattgtttaaataatgtctagatatgtctacgtataagatggaagagtgtagagaaatcttggcttgatttttatattatcttgcatccaagccatacaagtgtcatgccacttgtttctatcatgtggcttgctttccaagtggcttatcatgaagtttcttgcctattctacatgttttatcacatgaaggaccaatctaaagggaaggaataccaatttttcttcctttcatgccacatgtggtcatttttgatgatgaataaaaatctagtttcaatatggcattttcttaaaaagaaatccaatttaatttgaattcttttatctaaataaaattttgaatattataattctaggtgttcctaagaatttatcccaatgatagtttaaattaattccaagcagtcttatacagggcaatacataatcctttcattctagactacatctttatcttgattttgattgggctatacttcttctgaccgtcaaaattactaaaccattttattaaataggtctattcatcctataattaagagaaaattctatagatttcatgtatcatttttccatatttttttgatgcttgagttttcttgaataaagccttaaagttgtcatcttctaaaatttgtagaaattttattctagagttttgtgtcacaaaatatgttgatacttagtcagctaagtgtattctataatttcatcaaatttctacaaaatttctaaagttatttgagcatttttggcctaggggcattttggtaattatgccattcaacctaggggtattttggtcattttcaaaaatgtccaagggcattttttgtaattttcatcttaagggttttctagtaatttctacttcatggaaagagtgatatagttatttttctctaaacatacttgtatccaattatcatcacatttttataattttggggatgttacaatattcaggaaatataattgattgtgtgccctagtaattcataagacctagtaggtctactataacatgacttttatttcaatatatataattgggcttctgtgaatgtcctaagaaatattctgctacactatgcttgttatgaatgtgaggttgagaaatattgttgatatatttgagactgtctggacgcatgttatagttctttccatgcaaactgcttgtgtatatatggtaattggtttaaccttcgtggcatgattagtgtaatagcttgaatttttaaacatatgtttaagcctggattaagcacgtgttaagcttaggattaagcttataaatgaggagatattattaggccttggaatcccttgaaatgaggcttaaacgcttgagaaagagtggaaataggctattctggcctgcggcgcgacccacgtgaagtgcggcgcgacccgcgccagatgtgcatatatgccaatgctgtctggcctcccaagtgggtagcgtgaagtgcggcgcgagtagcgtgggaagtggcttagaaatggcattttctttctgccagcccaagtgggtagcgtgggagtccacgcgagtagcgcgggaactgctccagaaagtcttttttgcactggaacatggcgcgagtagcgtgggacatggcgcgactagcgtgggaacgtcagcagaatcagaatttaaaggccaggacgcgaaagggaaggagaaaatcagcctttcttcttcctcttgcctccacacctccattgatgacctcccaagcttttagggaccttatcttctagcctaaacactttcttgagacttataaccttgattgaaccgattagaacgctgaaatccttcgtccttttctttgaaaccccaatctaagtgagaaaaggaacctcagagggaaaagctccgagaactcgagcttggcacagacccatcgcgtgattgggacacaggagcttaggaaagccgtcctgaggcggttggagtcgccactgaggtaagaatcacggatttcaccgtttgattttcgaattgggggtttctgtgaatagtgacccgtttgtgttggggctagaattagcccagggtccagttgagaaacttgtttaggacgatgaatagatgaaggattagctttcagtttttgattctgatgattatggattttggctctgtgttacctgtgtggcctgtgttatggtcacttatcctggtcatctgatataccagagccttatatatatgttgtattgagccaggtttggctattggaatggtgtcttgagtgagacttggaccattccagagatgttggtatccttatgctgaggaaagcttatgccttgtatatgttgtattttgagtctgtgatgactcagatggcttgtaattagccttgagagaccttgtgtggtctgagagaagcctaatgataggctagacttgtactgaaccttaggataggggaattatgctatgtttgaagctgtgattgatgcctgtggtctaaatgttgatatgagctatgtatgccttgtataggcgttgattctgagtttactggtggcgggagccacagagcagggaccagccacagagtgatattgttccaggtaagttcagtgtccctggggatgattcccatcttgtgtgccacaccacactcctggggagttgtggtcatgtcataatacatgcattgcatttgcattctggtgctgatgacatatatgcctctgagcttgatgtatgctggttatatgctgagatatgattgttttatggactgtgattgtgcttgagatagatctattggccaatagatagatatggacctccctaggagatggtttcctcctagtatggctggctcatgggtgatgatgatcccggggtgatgatgatcccctaggccaagggaatagttcagatggtttcctgctattctcggaggtaccatatgtgtacatccccgttaagggtagcgtccggtgggatgtgtaacatcccgggcgctgacgagggcggggagtgatcgccggtgcagtaaggcacggacaaggagcggctcctggcaggcttccagcgggaggggtacatgaatgaatcgaatacacacccgaacgagagggatccagaggctgtgcaggtatgggactgtacagttgaggataacttaaaaggatttaataggtactacctataccaacaaggtgcatctacttttcggtagcccataacataagaactccacagttaagcgtgcttgacttggagtaattctgggatgggtgacctcctgggaagtttctcaggaagtgtgtgagtgaggacaaagcacactgaaaagtcttgtgttggtatttagggacagtcgttgatcctgcaagtggccgggcgttacaagtggtatcagagcaaggcctctctaccagtacggtgtggttcgaggacgaaccaggcggaagctggtgggcatgtaacatcccgggcgctgacgagggcggggagtgatcgccggtgcagtaaggcacggacaaggagcggctcctggcaggcttccagcgggaggggtacatgaatgaatcgaatacacacccgaacgagagggatccagaggctgtgcaggtatgggactatacagttgaggataacttaaaaggatttaataggtactacctataccaacaaggtgcatctacttttcggtagcccataacataagaactccacagttaagcgtgcttgacttggagtaattctgggatgggtgacctcctgggaagtttctcaggaagtgtgtgagtgaggacaaagcacactgaaaagtcttgtgttggtatttagggacagtcgttgatcctgcaagtggccgggcgttacaggatgacacaggtgtgagtttcggcctcacactgggagatggtttcctcccattctaggagatggtttcctcctagcctgatatgttgatataggagatggtttcctcctatttggtgacttgattacaggagatggtttcctcctgctctgagatgtgtagtcaccttgtatgatatgttgtgtgattgagaaagccagtgggctaggccagtgggccatttgattgtgatatttgtgtatgtgtattgtgatagtgggccaggatggaggagattcctccatggatcctgagcttactgagatatgttatctcaccccgtgtggggttatgtggtttcaggtgaaccatcaggaagagaagagcagtctcagggcaagaggcccatcagagactagactgctttgctaaggagcagcatagagagcatgaaggctccattttgattatgttttgagtttagttctgtataccccttctgagggattatattcttttgtagcaccatgtgtggtgtgaacctgagatgtatatattatacaaaactttgatattatgtatacgagactttccctgagtacatgtatatgtttatattgtagttactctgcctaaagctctgttatctgtcttatttatgttgttttgataaactggatcaacaggggcgtgattttatggttctgttgtgtgattccatacataatgtatcaagaaaacgatcctatgtttccgctgaactattttaattatgttttatacgcttatctgatattattaatgataacacgtcggaggcgtacggggtgttacaattagaacaggctactttgagcattgctcttacttttttatctgcaaaaatatatattaatagagaaaatagatacagtacaagtagtactgttaagattacaacctagcaagaacaaaatcagatcagaggtggcttaatgcctagagaagcatgaaaacgacacctaagttctgactttatactagattcttagcctccccaaaaaagaaatgtacaagttaagccctcccctaggtaccaaaacattccttcaaattactggaccaataatgaagggggagtaaaatcctaattccaaatttctgagccatgaccaatagaaaaatatagcgttctccatcaacttctgacaacttaagcattgatcttacttggtgtgccttgtgttataaagttagtaataagaatttactagacaatcatatactgcattaatcgttataattcaatgagctgcttatgtatattaacgaccttatatatagtaagagagacatgttttgcttaaaaaaaagtgagagacatggtcagtcattggtttattttatgttataatgcatatggcatgattatgaaaatgactacagttataggagaggtagattgatttgaatgttattggttttctttgtgaatgaaaatcttgtaagtattgtgacgcaaatacggatatggtgtgtttgttaatgatatactggatcaggttgttattagtgtcatagaaaattcctaatcccctttttgtgtatgttacattttatctgatatgtagaagtaaaaaatgtatttagtgttatatgaggacacgataaagattgtttggtttggatcccttttccattcatggcgaggaagtactagctgcactcaaggttactgttaaaaaaccttataagtttcaaccagaataccacaatggccatgaaaaaaaactggaatattgctactgagttatagaagttctctcttaaaaggatgtgactcctcacatgattggagtgcagtttactggataaaatactgtaatagccgttgatttaaaaatcaacagttgagattataataaaatatatgcacaaaatacaaaataaactatgcagttgttaaaatttcaatcattgcttttctcaccaaacaattattatttgaacaaggttttttgccccaatgctatgaatattcagtaccattggagctacagaaagtagcaaaatatgaaatttcttcttcttcttcttcttcttctcatttacttcttttccttttaagtacttaaacaacaaattgtgttgtacaataagcaataggttgaatagtaaccattggattcactcccaattctgttgggaagacacttgcatctgccacataaaggccctccacttcccatgtctccgctgttggattcaccactgattgcttcctattagaacccatcctgcaactcctcatttcatgtgctaagcacaatgatgttgtaaggtctatcaatgaccttcaactttaattaggaaaaaattctcaaactcatgataactcacatgctttatatttaaggtccttccattagtatgatgtgtctgaatttcttcagcaccagccgctgccagaattctctgcaccttcttaattcctttctttaaaatctcttcatctacacctgttagcttataactactacggtctggtgcttttacagtccctgatcctagatcccttgacagtgaaaatatatgagctgttctagaaaacttttgcattcggtctgttatattgattccaaaagtccatggtgtgacaattgacaacatactaggatgcaatgaaggtgtttggatcactacaccatatccagattgttcaaactctacaacaacaatttacattgctatcattatccctccttcataggtcttgttatatgcctctggccacacatcggattcaggggcatttgggaagtagccccatgccattgccaccggatgaagatgcaagttgctccctctgttctggttcctcaagccacttcttttaagcaatgctagagtactcagtgctccacatgctataattgtgactttggattccaccatacaaacgtctttagcccctttatattcatatactcctcttcccatgcctttattcctctcctctgtacggtatactttagtaatcagtatctaacttgtagcctaaccaggagctaatcaacataattatggttggtgttacgtgttttcggcaagtgcacggatttgtcgttgtaagttacaaaatttataagattgtctccacagggacttgagcttactcagttaatccaaatagaattaaatagttcaatagttatgtacaagtaggttgagcggaatttcatttgtttgagaaagtaacatataattactaaacttagtaaaatgaaatatatttatgagaaagtgggattgggtttcatcattcttatccttttatatccaattaatattagcaagcataaatcatcgtctatctttgttgatacacactatcttacctcgaatcgatcctcgcattcgagttctaaggatatctaccgaatatcgattcctcgcatatgaagtaaataccccagcattaagaattataatcgtgtgtttaatgcaatcaaaaaattatgccctattcctagcaatgtaacgtaatgagtaaaatcatttggttcaaaccctaagcttactttccagtctcacagttaaattcatgaaactagtgatcaagtagaatcaagcattaagcacaaaatgaaattaccaacaagaaatagaaacgattaatgcgtaaataaatattaaaagagaggcataaggataagaagattacatccaatcctcagagaagctagctactcatagtggagagaacctcttcaagagaagaattgatgaaggaacccgtcatcgcttctttccgacagagtctccacactaatcctcacttctctcacttttctaacctacctaatactactgtttaagttcctaagcttcaagatcaagcaaaggaagcaagaatgaagccaagaacattcctttctctccattttcgttggctatttatagaaatccatcacctgccagcttcactcgcccaggccaccattttcttcatgttttgctcgcctggggcgagctaaacttatctccttggaacttgtgctcgcctgggcgaccattttagcctttgggagctcgcatgggctagctaaagccttcagcatgaagtaatctttgggctttgatggattttgggcctggattgcttgtaacacctctcatgtttgctatgtaagccctccttgcttgctttgcttattcgaaagtctcagaaatccacataatctataaaaatgcaaagcatgattggattaatcttccaaaatatgaacaaaaacttttatacaagcactaagtgctatttaactaggtttagggcaaatttataatgaaatcttctgaaatcaaaagataagtgcctgcatttgaaacatgaatttaactgaattagggcacttattagttggttatatattctgagatgactaatagcatatagtattctaacaaacatcatatagtgttgtgaacatcaattcatatttattgacatctcatggacatatttctttcctagttagtatggaatagttaaggtatctgtttcccttttttgttctaatttatcttgttttcttgattattagcttttatatcagtgagttatttttgtaaatagattctttatatattgaatacccagtaactaaattagatatctccttgaaggaatacaaaattttctatggttttttcatataacatatatactattctttctgtatgttcatatgatcaattatgagcttggcttgttcattaaattaactttttagttgtccacttatgatttataatctaatgagataaggcaagtcaagcctggacattttttccattgcagtttatgatagcattttttctctgcaactttgtataggatttacagtatatttttgttgtatctttatgcaaattgtgatgcatgagtagcattaaatcctttggagaaaacttttatggtctagccaccatgatatatgtgctgaaatgtgcattggcatatgagatgcaaatttgaacaattgagtttatctctactattgctacttacttatgattgttcctcatatcaaaactttataattactatagtgtcgattggctttcatcctttctaatagaatattggatgttatacatgggttttagattatttgttcacaaaccagtatgtgattcaaactgcttgatcatgaacgtggatctttgtttttctcttttaaatttttcacatagagtttggtccttcatttccactcattgctattttgttgtgcttttatttttttttttgtttctagacaactgtgtcgcagagtaccctgttccaacatttgataaacatatgggactttaatcacaaccatgttccaggaagttgcgatctttatttcttggtggatttgaagtttcagtctccactttacagataggtatagttctgcgcactgatttcctttttaccttattttgttatattaaacactatgcttgttactcaaatcataaagtgtttttgccaccatctccagccaaccacttcttttgtgagcttttaagtcaaaccaacctctcacatgctgacgcattcctttttcttatctcctccacaccattgctgctgtagaagtctaagcatcaactccaccagctgaccatactataaccttcagcagcctttggttgtcaaaacccaccaatagttttatatttaacactacccctcatgcaagagccctttgatgacttctctgtcattctttaatgactttttcctattgctgcaatattcaaatgtgtgattcgccacagggttctgctaaatcatagaaagaaaattactagtattgtcatcacaatgttcacatgccattaatgaaaaataacactaacttttgaggcattcagataagaaaaaggaaaacttttcctgtttaactttcaaaattgatttctcttttgttccttaattagcttcaattcttcttcaaggacttgggcttttgtctagaactcatctttttcttgttcaaacagttgtttggtctgttgatgctgcctgtttattcttttgctgtgactgagttgagtatcctggacacatcttgtttcttttgccttcaagtcattctccaactgcagatgtttctcttccagggacgatctagttttcttgcaatcctccaaatcaggcatagcctgctccaaagctaatatctttagtccagttgatgtcttctctgccttcacatcttcacgtagttcagatgttaggcaaaatgaggcttccagtcactctttcttggaattagtagcatcgacctcattctttatagctataatctcattttcaatttgatgggtttgctgcaactgaacttttaaatttttagattcatccatgacttgttgtctttcatattcagtgactctgacctttaattcaagggaacttatagtacttttgaattttagctctcttgatttgtagtcttccaacagcttcaacaacttttcatgtttggtcatctttgtattcgacaagctgcgttgttaggtcttctagcttttgttcatattgagaatgcacgatatcaacctcattcttagccaaaatcacttattatgagattcttcaaaagcatattccagtttggccttatcagcacttaatgtggatacttcaagcataacattggaactattctctttttctcaacatgcgctagtgaaagtttcagactgagtttctcaacttctaattcgaggttctgagtttctaccatcatctccatttgcatccgattcaacaagacttgggtctgctccatatgtttccgattttcattaaaaaaaccatttaaatatgaagttaaatgcttttcttttgatgcaatatcttccagctttaaatcaaatttctttctaagagtgataagtgtcctattttagtaaaattagggttacaatactggcacttatcttttgatttcagtaaatttatttataaacttgccctaaacctagttgaattatatttattacttatataaatgatgtttttcatgttttggaagattagtccaatcatatttttgtcttttgataggttccgttgatatctgaagcttccaagcaagcaaagcaagtaaaaaagggcacaaaaagcaaaattggtaggtgccagaagcaaaatggcccactactcgtctaggcccatgacctttcttcagcattaagatgttaactcgcctaggtgagcatccacaggcaaaattgcttgcccaggcgagtaaacacaggcaaaaatactcgcctgggcgagtggaagcagacaagaggcaaatctataaatagtcatgcatttgtgaagcaaaggaattccaatttcgaaaattctcattcctaggacaagattctcagcttttgtgagtgaaattgcttaggatagtgtaagtgagggtgagagaagtggggattagtgtggagactacatggaaaacattgaagaccaatttgattaattgtaaaaggaagtatatgatctgataatccaattgtgcacatcatgcattaatcattcatttgggatcattagattaaaaggtttaatcaaaggcagtatataactaaggcatttaaaaggttaagtttttggaaaaacaaagttttactgaagtaatcgattacacatatactggaatcgattattttgttcttcgtgcctttagaaaacaaatcatgatcattgtaatcgattacatatcggtttaatcgattactaaggctttttatgtaaaatggaactctctgtcttaattgattacatagagttggtaatcgattacaagcctatgcatatagacttagaaaaaacatagctcactatcttaatcgattacatatcgtattaattgattactaagctcatttagaatgcatgactgactggtttaatcgattacttcacggaataatcgattatattgttcatagcccaaacccagaaattattaggagcattttaatcgattacagtcttgatttaattgattacaaatggtaaataatcgattacaggagcgtgtttaatcgattattttcagctaaaaatctgttataaatagaacttacatctctgaagtttgcaacttttgattttttgtattctgggctttcataaacattctgagatttcattagtgagtttctttgagttctaaacatacttggcttcacaaaatctcatatgggttgttgattcaagaaggtgaagcttcattcattcaaagcataaggaaaggactgcatatgtgattgtaatctgtctttcaacctgagaatcattcattgtgcattcattcttggattatcaggtcatagctttccttattctttgatggtgtaaactgttctttgaatatttgtaaggattagtctattgtaattgagtttcctgcaagtgtgagatagtgtttctctaaaagacagctgagtagtgttctcagtgtgggttttggtctctaaggatctaatagggttttggatctctgaacttcatctagggttgatgaagagaggcttgtaaatttgcttgtaaggatatttttacaatagtggaactctactctagtgttgagtagaagaactggatgtagcctcatagggtttgaggtgaaccagtataaaactctgagactaatctttcttctcacctattcatctcttaattgctttgtttgtgaatcaatttcattgcacagaaaattatactctgttttctattcttcttggaaaaggaatttgattgaatattgattcttggttttgaaataattttgaaagtgataaagatcctgtggtaatactctgattttaaattttaattggacaaggttcaacaaattcacccccctcttggttgtgttgaagtattcttatcattttcatgcatcttttttaatatttatttatgcatgaatctttgttattccttatgggtaatttcatttgtcgttaatgcttgattctacttgatcactagtttcataaaaagtaaatcctaagtttgactggaaagtactcttagagtttgaactgaatgactttactcgttatgttacgttgctaggaatagggcataacgttttgattgcaaataagcacgcaattatgatattaatgctgggatatttatttgatatacgagggatctatatttagtaaatatccttagaattttcaaatgcgagggatcgatttggggtaaattaatgtgtgcatcaataaggatagaaaatgatttatgcatggtaaagttaattaaatactaagggtatgaaagataaatccaatccgttagattttcatattcgtattttgttttatttcacaatcaaatgaattacctacactctttgtacataactattaaactgctaaattttatgtggattaactaagtaaactcaagtccctgtggagacgaacttttataaattttgtaacttacaatgacaaattggtacgcttgccaagagtctaacaaaaatttccactccttcagagcacttggaaaatctgaaggaaattccctcaacttggcttccatatgggagcaatatccctctagcttcaagttaaggctgcttcaaacctccatttagcttctcgaaagaacttcattcttctgcaagatcctcaatggtaatttgtagcttctaatttgctcctcttacatattcacattcttcttgtgcttctgacaagttcatttttaccacccttaatttttgtttccagtcttctgttgaaaaatctatctcaaactgcatctccataatcttctcttgaagtcttgcaacttgggatctagagttctctagttctgataaacgaaactcttgttcatttgtcaaatctctcaactgatcttctaaaacagaaacacgaattgaaaattgttgtttttcctgttctatgtcttatatgtgaagctccaattcttgcttattttcttttatcaaggtctccatgtgtttctctatttgatttttccctgttcaacatgataacactggcttccaaatcactcatcaggttctgtataaccccaatttccttttctttatgtcataaattagcctcaagatttcctatcatagatgttttattagtcagctcctttttcaaatgtgtgattcgcatcttctagagctaattttgaagtttgaacctcttgaattgaaaaatgatcatcattactaatcttgatgtcttttttggcctggaccatgtcttatgaatggaatattctaagataaattgttgcttacctcaaaccccaaggattgatgctaatttatcttataacccatactttagtaagctccatgtgactaaagcacatgattgtgcttgatgtaagtttctatcaagtattttaacttaaataagatttaggtagaagttaccgaccataatacaacatctgcaaaccatgactttcagtaccatgtctagtgatacttgctctggaaaccttggtcctagcatgtggaacttgttccctgatacacaataagagcgcactcacatttgctttattcctaaatcatgtctctttaatctttgccatgactttccctctaagcaacacaccgttattttaatattgagaatttaaaattctatatacatatgtctaacatagtattaattaattcttggttcttgttttaggtggttgttttttactcagttaggacctaaaggcatcttttaacttattcttggttcacgaaattaaaactcattgctattgtcgccctcactggattgtgctcttctttatattgaccatattttgaggtatgtcccttgttccatatcttatgtgtttaccacttcctttgttcatatctgactattgctttgtcacaccatgcaatgcattgttagtcaacctcagtttcccattcaagcatcaatttagtgagtaatacagatagtttggattattcgttgaattgaaccttgaattgtctgtttggacagtttgggaagttatatattgtatacatgatttgtaaatacaagttaagtatggtttgtttaatttaataaaatttcggtgtaactgcatattgctttgatctccgagtgcatacttgatcgtggtgaattcaaatcaccgctttcattttgtgtactcggagaccaatgcgaaatgctgccaaaatttcattaaattaaataaagcacacttgtatttacaaatcatgtatacgatatataaattcctaaatgggatagggccccaccttattaacattaagatataccttttcatgcatataacatttacaatatcatcatgccaacttatttcaaaaaccatggatcgtaactacatgaaatcaccgtgcattagtgaccaatatgaaaatgaggttgaacaattcctccaatttaccacacgtaatgtaacttctttgcatggatattatttttgtccttgtcttaagtgtggaaatgggagatgacagtccctaaatgaaatcagatcacatctaatatgtcacgacatcattccgagttacacaaaatggatttggcaaggtgaattgccagatatgccaatagttcaaaccactgcgtagtttgatgtagacacaggacatcatatagaagacatgctatgcgatgttggagaagccaatttttggcaagcacatgcacctacatatgagaaattacaaagtgattcaaagatccctttgtattctgagcgcacaaccttcacaacattgtcagtggtgttagctttggttaacttaaaggcaagatttgggtggagtgacaaaagcttcactgaattgctatttttgttgaagaaaatgcttcctgaagacaacactttgccaaaaaatcattacgaggtgaagaaaattttttgtcctatgggtatgcagtaccaaaaaatacatgcttgccctaatgattgtgtattgtactgaaatgaccttgctgatatgcaaaactgtccgacttgtggggtatcacgatacaaagtgaacaaagatgaatgtagtgatgaatcaggcagaaacaattcctgtccagcgaaagtctgttggtatcttccaattatttctaggtttaagtgattgtttgctaacgctgatgatgccaaaaaccttacatgacatgcacatcgaaggcaaggtgatgaatttctctgacatccggttgattctccctaatgggtgaaaattgatcaaaagtacccaatatttgcgaatgacccaaggaacctaaggctttgtcttgcatcagacgaaatgaatccttttggtaaccttgccactaatcacagttcttggcctgtgttgttgatgatatacagcctccttccttggttgtgcataaagcagaaatacattatgttgtgtatgatgatagggaggccaagacaaccaggaaatattgacgtgtatcttgcaccactgattgaagatttgaataaattatgggttgatgggggtggatgtttatgatgtaaatctaaaggaaacctttaccttgcgtgcaatggtattttgtaccattaacgactttccagcatatggaaatttgagtggctatagtgtcaaaggccattatgcatgtcgtatttgtgagaaagagacatccttcatccaactgaaacatggaaagaacacaatttacacaaggcatcgaagattcctgaaactttatcacccatataggagattgaagaaatctttttatggaagtcaagagacacaaagtgcacctacactgttgactggccatgaagtttatgaccatgtgaaggacattgtgactttgtatgggaagacccaaaagaaggatgctaacgaaagaaacatttggaagaaaaagtcaatattttttttatcttctatactggtctaatcttgatgtaagacattgtatagatgtcatgcatgttgagaaaaatgtatgtgatagtataatcggcaccctacttaacattaaaggcaacacaaaggataatttaaaaattcaccaagatcttgttgacatgggtatacgccaacagttgcatccaattagtaaaggtcaagaatcttatttgcccccagcaagtcacactttgtcgacaaaagagaaaaaaaatctttttgtcaatgtctgcgtagtttgaagttcccacaaggatactcttcaaatatcaagagccttgtttccgtcaatgacctcaaattggttggtttgaagtctcatgattgtcatgtgttaatgcaacaactattgcctattgtgatttggggtgtattgccagacaaagttagggttgccatcagtcgattgttcttcatgtttaatgctttatgtaagaaggtaattgaccccacatagttggatgatttggagaatgaggaggctattgtcctttgggaattggaaatgtttttttcgccctcattttttgacataatggtctacttaattgttcagccagtgagagaaatcaggttgtgtggtccagtgtttttacgttggatgtatccaattgagcgatacatgaaggtcttaaaaggttatactaagaatcaataccgattagaagttcccattgttgaaaggtatgttgccaaagaatgaattgagttttgttctaagtacatggattcagttaaacctgttggcatacctgaaagtcgtcatgactagtcaaggagaggaaattgtacacgaggattcaatgttgtaactatgagttgacaagaggtttcacaacctcatttgtatgttttgaataacaccactgaggtaatgcagtacttaaaagctcacaaacaacatgtggccaatactcaccccaaaatgaatatcatgaaggtgttgcaagaacataacagaactttcatgtcctgatttaaggaaaaaatcttgagtgatgacaatgcttcctcaactttaagactgttagctcttgggccaaacttaaatgtacccacttggaagagatatgatatcaacaactattctttttacacaaagtcgcaagatgataagagtactgtgcaaaacagtggggttactgttgacgctgacttgttacacttttctcgtgcatctgatagtaacccaattcaagtgtcaatgccatactttggagtaattgaagaaatatgggagcttgattatagtgcatttagagttccgattttcaagtgtaagtgggtaaacggtaacatcggtgtccatcaagatcatctcggatttgctttggttgaacttgataaagtgggttacaaggataagcctttcatcatggcagagcaagcaaaataagtgttctgcatcaaagatccgtgtgacactcgattttcaattgttttacaaggaagagcatctattagtagtcattattatggtgatgatacatcaatggatatgtgtgaaatgccttgtttctgaacacagatgccctccatagttgaagacaatgacgttgatgatgaacatgcaaatcgggttgatcatgatgaaggcttatgggagaacatgaatacgtagttgctgactttcaaagtaaagtattttcaatatgtagcttttccaatgcttcgatttacctttaatattaatgggtttattttaatacttttatgttatatatatgactaataggatttcattgtttgattttacttgcagagtcatgtcgacacccacattgtcccctcctaattcacaacatcatctttcagattcaacgtctaagaaaagtacacaatcgacccggctaaaaagcttgactcatagagacttggatcagccaaggccaacaatgaacataaatccttcaaatggaagagcatcaaccaataacaaagaaaaattccacaactatcttggggttgtggcaagagacaaaattcctatagttcattcttcttggaaagacgctccagaaacattgaagaacctaatttgggaagacattttttatggaggatcaatgcaagctaaagagctaggactcaagcacttcaagatcatatccaatctaacttgtatctcttggaaaagtaagaagaagccaaaaagaagcccacaaaagtaaaggaaacgcacaaggagtgttgtctgttttaacagattaaaagcatcttgtaacagattaaaaacatctttctgatacctgtaatcgattacaagcatcctgtagcagattaaaagaatctttctgatacctataatcgattacatgcatcctataatcgattaaatcatcctgaaaaatgaaaatatctctattttaatcgattacatgtcgaattaatcgattattttggtcataaatcagtttccgggaaggatttgagcaaaacaatcgattaccaagtcaagtaattgattacttaggttaaataatcgattacatggtcgaaataatcgattaaaccagaagtttatgcagaaacacgattttgtgaagccaaaggcgttttgaacaaagcttgcactacaacctacatttgggcttcatttcaatttgcattttacttacatttagggtcatttaggttgtaattttgtgggctatataaaccacaccaaaactatttgtaagaacttttggattcaattaatacaattatgaaattgttgagagggtttctctcgtgttcttattcaagaaccttcttgtttcttatcaatggctcctctactattgtggtgattcttgcaagacttattggaattcctattccatggtgtcattccaattcattcttattcttcttccacaatccatttctacaaattagaaatctcttaaaaagccccaaattccgtgaaagtgcagaattgtccatttcttggagtttgcttgaagattgggtttcattgcaagatttgggaaacctaatgtctattggttgtagacattacatcatgtggtatcagagcctaatccttgtggaattcttcttcaagttcagttttaaaagttcttcaaaggtaaaaatctgcatcaaacccaaaaacgaaaattccatttcaattctttgtttcttgttgttttcttctgattcttggtggtttggacttcttgtgtgttcagctacaaaaccttagtgtgttcttcaagttccatgtcatttcatgttcttcgtttttcttgatattttcctaattttctagtcttgattcttgtcaatttttgtttgtagtgttttttgtgttgtatgaccacttgttttgattctactctcatgcctaaagataattgagttgttagaaacaaattttacaattgttatacatcatattttagtgattcattgaatttctttgggaatttgtgaacttgtgcaaaagaaaagcaaaagcaaaaagaaaaatacatcaattagtattatattgttacagccaaatacattattgagtagtggctggaaaaggtgaaagaaaaatagaatttagaagcaaagttacaaaattacaagttccaaaagttcctttgaacaacaaaatcaaatgaacttgtataacatgcacattggatgaaacttggcttctagcaattgaatttacttggcatatccttcttgtgcaatgtggtacaacctatagtattccttgagttgtctcataaattccaataagagttgttcttttctattttttttttccttttgttgcttgtctcttaaatttccaaggtttttgtcttagattttcttgttcttggactcttgagtctagcctagaatcatttcctatttcactctagtagagaagcttgatttgattagaagtttttgtttaagaactatagagaggaataagagtgggaaaaggcaagagagaaaattatagaaaaagcctagaaagtgtgcaaacacgagtgaaagtggcaaacacttagagagtggtgagaatttcattatatacttgtgttttgctaaccaattttttttgaaggatgagtttaagtggaaatgaggctttgtcacctaagacttctaggttgatggaagctttgaccaaaaagatggaagacttcaaaatggaagtacatgcaaggcttgaagagattcaaaagaagcctcaaagaaggggtagtccaaatggtagtgtggatagagaggctcataataataggagggtaagtgactatgcttcctctcatggaagaaattattatgatgaatggagtgagagggaggagaggagagaacataatagaagagaaaatagaagataaaatcctagaagacaaaatagagatgaggaggattggaagattagaagagaagaaagagatgggaggaatggaggcttgggtggagtaaaaattaaaatggcaaaatttcttggtaataatgatcccgaagagtactttgagtgggagataaaagtagaacaaattttctcatgccaacaattcgaagaagacaagaaggttactctagcaactatagaatttggtggctatgccttaacttggtggaaccaaatgcaaatggaaatagggaggggaatgaggccaagagtaaattcttgggatgatttgaaggcatgtttgagaggaagatttgtccccacttattatgcaagggaagtccacaataagcttcaagacatttccaaggttacaagagtgttgatgattattacaaggaaatggaattgatggtcattagggctgaaattttggagagccaagaagcaacaatggctaggttccttcatggcttgaatagagaaattcaagatgtgatggagttacaatcatatgaaacacttgaggagttagtccacaaagctcaaagagtggagcaacaaattagaagaaaagcttccttttccaagagcaatggggctggaacttctagttggaaagacaagcctaaaaaggaggttgctcatatgaaaaataagaaagaaagggtagacagcccaaggaaaaaaattgtggagccaacttatagaggatcaagcaatatcaagtgttttaagtgccttggtaagggacacattgcttcccaatgtcccaacaagagaactatgattttgcttgaggatggaggcataaggagtgagtcttcaagtaactcaattagttattcaagtgaagaagaaaaagaactcacactagtggaggccgaagagggtgatctcttgatggtaaggagaatgttgagcaatttttgcctagaaaaaaaggagaatcaaagagaaaatatttttcacacaaggtgcttggttaaagataaggtttgttcacttatcattgatggtgggagctgcactaatgtggctagtacaagacttgtggagaaattacatttgccaactacaaagcatccaaagccatacaagctacaatggcttagtgaaggtggagaagtagtggtaaattctcaagtgctcattcctttttctattaatgcttataatgataatgttctttgatatattatacctatggaggctggtcatatccttcttggtaggccatgacaatatgataggaaagtgatacacaatgggatggagaacacttttgagtttgagcacctaggcaagaaaattattttgaggcctttaactcctagacaagtgtgtgaggatcaaataaagatgaaagaaaagagaattgaggaattaaaaaaaaaatactgcacctaaaaaagagaagaaaagtgagctacaaaagagaaaaactagtgagaaaaaaaagaaagggaaaagaaaatgataacaaaagaattcatgagattaaaaagagatttttcttgagaggaaaagatgtcaagagagtgttattagcaagacaacctcttcattatatggtttctaactctctttgtttacatgttgaaaaggaaaagaaactatgtgttcctaaaagcttgttgaaagaacttttcatgagggaaactcatgggaacaatttcatgggacacgttggtgtaggtaaacctttggctactttacataaacaattcttttgtccaaaaatgaggcacaatttgcataagcttgtatctcaatatattacttgtcataaagctaaatctagaataatgcctcatggtttctatacacctttgcttattcctaacttcccctgggttgacatttctaaggattttgtgcttggtcttccaagatccaagaggggaaaggattctaactttgttgttgttgatatattttcaaagaaggcatacttcatcccctgtcacaagagtgatgaaggttgtgaattagacaatctcttcttcaaggaaatggtgaaacttcctccatggaagcaaaagagatataagcccaagtggaaggatagatttcttcaagagaatgttgagttgccaagtgagtatggtgtgaatactactttcaatgtttgtgatctttctttgtatgatgtaggtacaagtaggagggaaacttgaggacaagtttctctcaagaaggaagggatgatggacgatcaatgcaagctaaagagctaggactcaagcacttcaagatcatatccaatctaacttgtatctcttggaaaagcaagaagaagccaaaaagaagcccacaaaagtaaggaaacgcacaaggagtgttgtctgtttcaacaaattaaaagcatcttgtaacagattaaaagcatctttctgatacctgtaatcgattacaagcattatggaatcgattaaatcagcttgaaaaatgaaaatatctctattttaatcgattacatgtcgaattaatcgattattttggtcataaatcagtttccgagaaggatttgagcaaaataatcgattaccaagccaagtaattgattacttaggttaaataatcgattacatggtcgaaataatcgattaaaccagaagtttatgcagaaacacgattttgtgaagccaaaggcgttttgaacaaagcttgcactacaagctacatttgggcttcatttcaatttgcattttacttacatttagggtcatttaggttgtaatttcgtgggctatataaaccacaccaaaactgtttgtaagaacttttggattcaattaatacaattctgaaattgttgagagggtttctctcttgttcttattcaagaaccttcttgtttcttatcaatggctcctctgctattgtggtgattcttacaagacttattggaattcctattccatggtgtcattccaattcattcttattcttcttccacaatccatttctacaaattagaaatctcttaaaaagccccaagttccgtgaaagtgtagaattgtccatttcttggagtttgcttgaagattgggtttcattccaaggaagatttggaaacctaatgtctattggttgtagacattacatcaattttggtatattaagttgctcaatgtttatgagatagttcagttctatcttatgatattgtaattggaaattgtcaaattttgttgaccactgcagggaaaatttgatatcccagaagtagaaaaggcaaagaacaagataatgtcatcggtttgcacaagatggaggtcattcaagtcttcattaaccacaaaatacatatatgctgaaggtgagagccaaaatgataatgatccttaagttagatatggtatacatcctcaaacttgggaacaattcgttgcgagcccaaaatcactaaattggcaggttagatggcaatatatgttttagtttaattacattattcaaatgaattgaaatttaagtgactcaatgaactacaattccaaaatctgacagggaataaggaaaaaggctcaggaaatccaaaaaaataatgaatgctcccacatactttatcgtgggggttatgactttgctagaaaaaaaatctaatggatgaaaaattaaagaagcaagtacaagatgcaatgaatactgaggattcctcaaatgtggatgaccttccatctccaattcctagacatgtcaagtggaagctggcccgcacaaagaaatatggacacatgacatctaacacgaccaaagaaatatccgataaaattatgagttgaatcaaaggttcctattattattttatctattaagtacttaattagatgataatttgtagcttttatgttgcaaaactcgttagaagaacaaatgacacaaggaagctttgttcctcatggtcaacaagacatattaaatgctgctattggacaaccggagcaccctggtagggtacatgttgtagggacaggtgtgaccataagtcaatactttggacacacatcacatgcctccagtagttcttggggatccatcaactcgaaacaattggctggtttaattaatgacctcaaggaagaatggaggagacaagtggaggaggaaaacaaacaacgtatagaaaaaattaaagctaaattggaggagaaaatgaatgaaaaaaatgaaaaatgaaatggaggagaaaatgaaagaaaacttgaaggaagcaataaaaactgagttaacccaaatggcaacacaaaaatcacccccggttgacgcacttatacaagaattggttgctcttgttagcacaatgggaagttgtgctgaaactgcagccaatccatcaggggaagaaaatgcaactgttgtggtgtcacgcatggggctgtttgttgaatgtcatgggtcgacaaagcaagttgcattggaaaaagtttacgatggatgctcctcaattcacaatgtcaactacacagatgatgtcgtatgggtaagtgttgaaaaaatttataacggggatgcgcttgttccatatccgatgtccgagattacgtatgttagagagaccctacacacatttgtcgcttggcccacatgtttggttaaaccagtatcacataggatgcacacattagttcgaaaaacaatcctgaagctgttaataggtcaaataaactggaaacagttgatcctttggatgaattgattaagaacgtctatgaagtttaccataggcctatacggttgtcgtgggatgggttaaagtttgggattgctaatgtagaaacatcattcttcattatgtattcagataataatgaaattatatcaggtgacaagtatttgaacatttctatactacagttgtggattatgtaagtaaaaggccatcaaatgtctcatttcatgtcctatttatttttagttgttacaatatttatgtttaacaatttcaatttcacttaaaatgttaataataggtttctagatcaatggagtacaagcttgggttatagttcagtgtatgggttcatggagcctcaaatgatacataatgcaaaggatagacgttttgaatgtcaacaatacattcaaacatgggtcaaagaatcacaaagagaggcgtacctaggagcttatttgaataagtaggaaactaatgtggtttaaggaataagtgtacttgtttatatttggttgctaatatatataaagtgcagtgcacattggcaattgtttgttgtttgtccttcgactcatacagttgtgtggttttgttcattccgtaaaaagccagacattcacatcaaagttgtacttaacaagtaatttgcatcgaaaattaatatttttacattatgaactgaatttatgcatacaagataaaggtcatgtgttaacctagacgtatattgcatttcgtaaattagttcacttaaggtttgaatatcaatgtcgatggtaaatgcaatgtagctgctctgaactggattgaactcaaggttagacatttagttgaccttcatgcagcttgtgttgtcatattgtatttgcaattgtgaaatttaaatttaaatgtttaaaaatttagagccatgtgcaaaatggaggctttgaatgtgggtattacataatgcattggatgtggaacattgtaagtgggggtttgaagaatgaatggaccaagttataccaacttgaacacatttgtatgtttagttgaatttgttaaatggttcatgactttaaatgtactggactaatttgtattttgacttattgttgcagtggtttagtgatggcacatcgttagatgtggagaacataacaacattaaggaaaaaatgtgcatcatttttgttagaatcaaaaaataaatcattgtaagctgttttgtatggcgtacggtgttttttaaatattccgccttcccatttattaaatattgtagacattattaccaagtttgggatctttagttgtgacaattaatgaacaatttaattacatatttaaatgttgtgaagtttattacaagcagtcttcaaataaggctacatatatatgttttgtattttgttcgggaaatgaaactactttgcagggcattgtttagaccgaaattgcgttagcggtaatggtagataatttcaatggatccaacacttatcaggtttgaattgtccacttatgaacttttaaaagtttgtatgtacctgttgttttaatcataatggatattgtagccttgtgcagcccatttatttttataaaggattgtcatattgttatagtggttaagaggtgaaagcatcatgtatgatctcttttttggtaggtcgtagatgtattgcttgttattttgagatatattattttacaaaattagggttattcatgtgttattgagtttttgttatattactacttagtagttttattggctgggcctgtgctacactaatacctagattagtaaaataactatgaattattggttcctgtttttttctctctctaataaattataaattaatgctacaaacttttaaaattcatcaaagttttgatggaattctgctagattcaattcaagaatggatgttagataagataaagctatagggactgattgagcgtttttagtaaatattttttctattattcttagcttattttgacttctcttgaacttttattttctcattctaattcaggttttgtcttagacaagcaagtgggcttaattgctaattgttgcttattttcggattttatgctcacttgaccgatcttccttgtatagaacctacagagttctatagaacttcgaatagagcatatgagtagtccttggaaagataacaaaaaggtctacaagttttcagagataagccgacgccaattttgtgatttggaaggtcattttaggctttgaagtcagaatcactgcacttgaattttgggttgcgagttggatttttattggtgtaaatagcataattaagtagaatagatgagcctattcatggtccattctttccttttgacttaatcactatatgctagtgaaattagtgagtgaacattacactacattttagcaaaaacaaaatttagatttcctttataagttttcaaaattaaaaccctttctcttattttctctcaactattcattggatgttaaacaaataatcaatccaaggatccagccaaagcatggagaatttgagttctggtttggtatttcaaattctgtgtgaatgttcactttcttcttcaatcttctattcaattttcatgattatgaatgtgtttaggattgaaagcggattaggttatggataatttcgaattttaatcacagattagttggatgatatttcaattaggtttgtgatttcaattaatttaggagttaattcgattgaactgcttctaatgaaattgaatgaactttcataacagaatcattatttgagaactatgataattaccattgcttggtttggtgaattggattgatgctctttaatctattttacattacctcttgtcaatttgcattagtttatacgttttctgcaatttttacttatcgcatgcaaattgtttgacaaaaatcccctattgtttactagtgaattgaagttggaaccatattgatagtgtctctaagtcgacctaggttaatcttgtgctacagaattagcgtagtttaattgttttgaagtgatacgacatcgcttatcagggaccactaacctatccaacttatcctatgaaaaattatagcttatctagcatttttatatttagtatatattatatcatgtgattatcaatcagatatgttgtttctcctctttttttccatcaaaccgttgtaatttcaacttaatgttatagttctaccattctccttgacctaatatcatcactattctgctgttgtctacagggtatccaaaatttggaactcctctcacggtgtctttttcagtgacttgactttcttttttgttgtttgtttctgtttgactatgcttatgcatgactttatctttttagtttatatttgctctatccttatgtttgtctctattagggatatctgtaatttcttctagaagcaagctattgattgagtcaattatagtagtttttcagcgaattcaagcctggatcagttttccactttgcagacatgtttagatgggttttgtcttctgaattcaaatatgaggttattattgttggttgatgtgttgctaacacatcttagttttaggttatatttcaattaaatcattaggaattaggttagaataagttagtttgctattatatctcattttaattatatctcattttatcaccaaagttatgatttcagggtcaaaaagaggaggatcaagcaaagaaagaagaaaaccaagctaaaggtcccgcgcgaatcgcgccaggacccgcgcgacctgcgccaactgcttaagatagcctttcaactcgaagtatccacgttattcgcgccatctattcaaatgcctcacgcggaccgcgccaattctcacgcgactcgcgccacagggcctggagatagttttgattcgtgctagccgcgcgatcagcgaggattccagcgctatcagcgccatgattttgaactagccgcacgatcagcgcgggtctcgtgccatcagcgtggcggagacgcagtttcctgatttaaaaagattgagttcgaaattggcacagattaggggctatgttactctagataaaccaatctataaaataaaggcttctggactgaagaagagggggactctcacacaccactggacaccattccacaactcccattatcatattttatcattctaaaccattggaagtcaagaatcaaggctaggttattagagaatcatgtattattcaacaacttttgtattcttgaagcctatggcagactaaactttgtattgtgggaaggccatgaactgatgtgaacttctctgtaacttaattggtattgaatgagattttcttgattgttttattatactctgttctttattgttttattcttatttagaattggccattctatttaggtattgagggttaggattcgcaatgggacgttggggttctagtttctgaccttagtaaagtaacagttgttcattacctagggatagggatgcgtgactgcaaaacttataatatattcttttaattgcttaacttgatagaactcactaagggattaggttttcaattcaggttaaagggttaattcgctaagggattagggtttaactaaaatagaaaagattcattctctaaacaataagaaataagcgaaccttatgatatagtcttttatatgcttgataggaatcgctaaggaattaggattcttgttaaaggactaaattgctaaggaattaggatttattaaaatcggaaagatgtatcatttgagtgatcaaacttgataaactagttaagtgaaagaggtagggatcagagaggattgtacctgaccacaattgtttcttccattggtaacacgtcaacttattttactgcttattttaatttcagttttatattcaactcttcaacacacaataatcatttctcttcaaaaacatcttctgtttttacttccaatcacttagacttaatattactgtgaatttcaccccaatccctatggagacgatactctacttacctactttattacttgaaacgagcagtgcacttgccgtgttcgcaacactggttctcttcctcccttcttctctatggccatacaacattgcaatagcttttatggttctgcgtcattccaggtacattgtctagctatgtttctaaccgtgctcattgttgtgtatcacctctctaggatttctttaactatgtttatgatgttgattttactgagttgtctttccaagtttcattatggacccagcttatattatagttttagatgttgtctttaaatgtttatttgtaaaagccttgtaagctttagcttaaagaagagtgctagaatattaggataattcatgtgttaaaaatcgtgctatgttactactcttgttgaactggatttgtactagtaattggagctccaggcagcagttatgcatgacgtgcttgatgccatgcctggtgatcattttttatttaacattattctttctaattttgtgttttctttaatagagtcatttctgctatttcttttccctaagggatatactaaagttaaggtgttttcctccttgatggcagagggtataaagcaaaataaggcaaggactatattgcaacatttgagtgaggcctggagatgctggaaagaaaatattccttggaaggtattgtattttgtagactaataatattgcagtttcagcttaattttggagaaataatcaattgggatgttgtaaaaaagtgattttcttttgaaaataaatcaatccaaacaagcactaaattgtattgctggtgagttagttaaactaaatctgtagttggtttgtaatctcctagaaagcttaaaaaatgcctttattttgacaaaaaaaagctaattaagtcaaacatgcactaaattatattgttggtgactttgtaaaactaagcacaagttgggtttggagagcacttcatggtttgttgttcatgcaggttcatattacccaaagaggggttattccacaattagttgacttgcttaagtcttcatatgatcttggggaaatgtcggtttttgcacttaggagtttagcttcggtgattattactacttaatagcaacaaacagttggtcgtatgcttataaggaatatgaaattaaagtattcaaattgattcttttaattatctttgtagtaactgatgaacttaatctatgattctcaaataatctcatattttttgccatccttatagatgtgtgcttataataggacagtttgcttaaagtttaaacttaagaaaagtgtttttaaaaaaagtgcctttaaaactgtttctttaagaaataagcttaaacaaacaggcctaatatagccagacaatcttacatatggttagtgttcattggtggattccatggtaggcattgcctccttaagatttttctaacactacagtctaccctaagtattttttgctgaatttgggattgcctttcttaaaaaatatgctctcgttttggtaattttatatatgtggtttttgctctcatcattttccttccttcttttgcatatatcaggaatcacataatcaagttattattgctcataacggaggtatacagcctttgctcacaatgcttgactcagaggaggctgccctccaacatcaagctattttatccctctatggtcttgttgataatgagctgaagttaatttccttgttctttacttggccaacattgtattttgccttttagaaatcattgatgtgcagtgatgatgttatatgctgccactaatgtaataacttgcggattttatcgaggccggtggttttcaaaaactgaggaatggacatttcaaatataaagtatgttcatttactctttgtaattaaagtaacggagtttatttttaacatgcatttcttgttgatgataatttatagttgttgttaattcttcttaatgataatttagttgttattaacgctcactaacagaacaactcactcaccaatttattaaagtgggtttccttgtgattgtggtttaacttgcagtctactaaacagtgtatagaaaccacattaaaaagattagaggagaagatgcaagggcaagtgagttttcttgcaaattctatctgggtgacttagtttagtcatagatgagaataataatatatcaaaactctatttttaaatttttttttttacattattggaaatatgattttcatatctattcttctttggtaggtaccgaaacgcctaatccatcttatgtgctatgcggaaaaagggctacagatacatgtagctactgctcttgcttatttatgttctcctcgtgattgtaaaaccatattcattgacaataacggtaataattgatttgtacattttcataatttctcactcatggtgcttcaaaagtattttcgatcaatatgctactacatattcaaggttagaattgctagtggatacccttgaatctccaagcgtaaagcagaagcgtttgtaaattggctgccaaagtgagttctcaatcaccaaatccccaggtacctttactctttatgtgtgagcttgtcatgtttgtttgttttgatttgttttccttatttattgaactgcttgttctatgttatcattatttgcattatttaaatcggtaaaatactttgtctttgaaattgaattgttgatcttttgttgtccatatttgttctaggaagctgagattgcttattgttcagggtaatattgattgttggttgcatttgttgtagatgtactttagtgaggaatatgtaaacaatgccaaactttctgatgtcacatttttggttgaaggtggaggagcatctgctgctaaaaatttctacaagtcttgagcatagtgagacacgataagcaatggaaacttggttccaaaagatttctgaaatctgattcaaatattgtagcaaagagaggtcatgcattttttgttcttaaaaagtcatttggcctcatatgaatttggttcaaattctttcgcagtctggctgaaggtaaaacaagtgtgttttgtgttctctattagccccataatttttttgttgcctcactatgttgaaagaattgttgtctggattacttctatagaaattttaataattgaagcgacttccttatcattgatgcgtgttgcaggaacgtcaacataattatttgaaagatggtccatatgttactcctgaagaagttgtggctatctatacaacaattgtacattggttggaatctaggaagttctcccctattccctttccacctttatcatataagcatgataccaagctgcttatccttgcacttgagaggttgaaagaatcctatagtgttgcaatgaggttaaatcaattgtaaagagaagagttggggctgattgagcaagcttatgacaatccacatgaggcattatcgcaaatcaagcgacacttgcacacccaacatgcattcaaagaagtatgctaatataatcaatctagttagctttaggatgtccatttctagcacaggacaagtataattttgttttgttttattttgacaggttaggatagagtttatggatttatatagctacttgattccagtttacgagatagagcctcttgagaaaattacagatgcatatcttgatcaatacttgtggtatgaaggtgacaagggtcatctatttcccaattggatcaagccagtagattcagagccttctccccttttagtttacacatggtgtcaaggtataaacaatttgcaaagtatatgggacaccaatgagggtcagtgtattgtgatgctgcaaactaagtttgagaaattctttgagaagattgatttaacaatgcttaacatgtataaatttattttgtattcactctatgactgcacttagttattttctctgctaaattaattaaatgatcttgcagtcttctacaactggttctagaccataatattaatgattatgtcactacaaagaacaatgttgtgttgtcatacaaggatatgagccatagaaattcatatggtcttatacgtggcctgcagtttgcttcctttgttgttcagtattatgggctggtattagatcttttacttgttggactgacttgagacagtgagattgctggtttgacacatgtggctaaagttgaagttacttataaaatacttctatattggtatgttaaatttggaatcatattacattgctgtgatttgctacttgatgttagtcaagaaatacttctatatgttacctctaatataaattctgaacatgcagattttatgtggtatatattaatatttattcattttgtgtgtttcaactaggactaaaacaaaataacatatttaggaaaacaagattgtaatacgattttcaaatgttaaagcataaaagaaaacattttaagaattaaaaaataaaaaaaatgaaataaaacattcaatctaagacgttataagcaaaaaaccgtcttagaatccaacattctaagatgatttctacgcaaaaatcgtctttgaagacttaaaaaaatcaaagacggttgttgaacaaaatcgtcttaaaatggatacatactaagacagttatagcgtataaccatcttagaaggtacttcaaaaaaataaaacagaatctaagacagttatgcactataaccgtcttagaatggatacatactaagacggttatagcgtataaccatcttagaaagtacttaaaaaaataaaaattaaaacattatctaagatggttatgtgctgtaaccgtcttagaatgaatacatactaagacggttatagcatataatcatcttagaaggtacttaaaaaaattaaaacagaatttaagatggttatgcgcgttgtaaccgtcttagaacggatacatactaagacggttagagcatataaccgtcttagaaagtactttaaaaaaaataaaaattaaaacataatctaagatggttatgcgttgtagccgtcttagaatggatacatactaagacagttataacgtataaccgtcttaaaaggtacttaaaaaaataaaaacagaatctaacaagattatgtgttgtaaccgtattagaatggatacatactaagacggttatagcatataaccttcttagaaagtacttaaaaaaaattaaaacataattgaagacgcctatgcgttgtaactgtcttagaattgatacatactaagacggttatagcgtataaccgtcttagaaagtactttaaaaagaaaattaaaacataatctaagtctgtcttacaaccgtcttcgtatgtcccactttcaacgtcgctcgatacaaagactgttcgagaaccgtctttgtagggatcaaataaccgtcttaaaaagttgtttatgtagtagtgaattgactaaagtgataagataattactactccctattatataaacaaaaataactaacttcacactaaataaaatgttagttgtcatcatttaatttgattaatctcaagtaaaataaaagattatttcaaaaatgttcttaattagaatttggtatcatgaataaaagagtcattgaaaatataattaaaattatatgaagaatgttttaagaataataacattaaataagaaaaaaatatttaattatttatatttaattcaacataaaatatcatatttttttgtatatatatgattctagaggagttataataaaagaaatgagacaggaaaagtgcaacctatcatataaattaaggtggaaaaatttaagatcagttacatgatatagatcaagaaatctaaacatgtttataaaacatgaaaaacaataagcaattatacctcaaataatgccttatccaatatgagcagaggacttccaagtaaattgaagctcccaatttcctaggatacaaatctgatgggaaagattgtgaaaggtagttcatccaatcaagtacccttaatttatttgggagataacgaggctcgtgagaaaatcttgcacgacgaacatgcaatgagaattctaagattcttcatctttttaaaatagtatcaatacaattaattttctccatttaagggggagcatgccttattccttgaattttgctacttccctagcaattataagtaacattaaaaatttattcataatacaaacaaaaatgttttacaatgacaaaaatcaagaaaaaaagttgacatcattcttacattatcatcgacaagtacttgaagaacatcttcatgatgccatcataatctgctgcgctcaccaacttcattactttcttcctccttaacaatctctctacccatttctggtattagctaggtcatcactactacagacgggggaaacgacgacggttttagagcccaaacgacgacggttcttgaactgtctttgttgcgggtgtcattgtaagttggcactttcgacgacggttctaaaaaccatctttgtaaatttttttattttttatttttttttaaaaaatagatacaaagatggttcttgcaaaaaccgtctttgtttgtgcactttcaaagacgatttttcagtaaccgtctttgtttcccttcatttttttttattttaaaataaatgaaaagaagacgattttccgaaaaccgtcttcgtaggtcaccctttatttgaaaatttttttattttaaattaaatgaaaagaagacgattttcccaaaaccttctttgtaggccaccattcaaagacggtttttacgaaaatcgtctttgtttccctgcattttaattttttttaatttaaaagaaaggataagtgtaatatcttgaattttaagtatgtgattaacactggttaagcctaaattaagtacgtgttaagcttaggattaagcttatgatggaggaaatataattaggccttggaatcccttgaaaggaggcttaaaggcttgataaagagttgaaataggctgttctggcctgcggcgcgacccgcgtgaagtgcggcgcgacctgcgccataggtataaaacatgccaatactgtctgccatcccgcgcgagtagcgtgggaacggcgcgagtagtgtgggaagtgccctagaaaaccatgttttcctctggagctccacgcgagtagcgtggatgttcacgcaagtagcgtggattggcagtgctgtggcgcgaccagcgcggtaactggcgcgagccgcgcgggatcgacggatttgcttttatatgaaaccttttgggcagagagggagagaaaaaagaaaaaggagaggagagaatagagagaaacctccattgatgagcgtttgagcttcataccttcttcatcgttcatctaaacacctccgacccaactgagaaagtgattagaaccccgagaagagagaaaacccccgattgattcttgagaatagctgagaaatagtgagattgatttctctgagagaacccttgagagctcggagtttaaagacgaaagaggccgtgattgagcaagttatcttagggaaagtgattccctagtgtttctgaacattacagaggtaagaaactcgagctctaaccattggttctgtgttttggatttcggggttttggggtaatcttgaggggtgttttggaggtgttagagccgttattaggctcggactctgtagagtcttatgctcagagaactgttctgaggaagttagaaccttgaatcatcattattgatgaagtttgattttggctctgagtcagtctgagcagagataaaaggctagttatatgactagtatgaaccttaggacagttgacaaagttgctcatgagactatatagaggagattgatcggttgaaactggtgattgtgagaggttggttttaagcagaaatatgcttaaccatagcttgatcagatttttagtagagactctgtagcctgatataggctgagagggatcctgtggagggtcagatgagcacttagaaagtgattgggttgtggttatgaaaggatgagagtttcctttcatttgaacggtttaggaccgtatttgatgtgttatatctgtattcttatgtaggacgtgagcctgatagctcaggtggtgttgaccacgggaccgggagagccggtgacttttccagagcaggtaagctcttggttcttgcttgtatgtccttactgtgttccaccatactcctaaaggggtaatggttctgttgagctgttatgcctgtgtttggcatttgtgtattgctctgattgattgatgattgatgtttgtaccctatgagagggtaatggctatgatttgatctgtaatgcttgccatttgatctggatctagaaagagatgataatcgtgcatagttattgattgtttagcttatgatatgcatgattgattgtagaatcctatggtaataggatagatgacatgtatttgaaatgagtttcatgatggaggtcggcccggtatataggagtcctcctaacatttgttgtacctatatacttcggaggtgcctctaattgactttgataggtagtggtatccatcggaatcatgtagatattgatagatggtgatatccatcggaatcatatcagtattgatagatggagataaccatcggagtcatatcaatgttgatagataagataactatcggaatcacatagatcagtgatagatggtgataactatcggaatcacatagatcagtgctagatggttataactatcggaatcacttgataatgacagatgggtgttctttgactgcatatctgctgattgaacgagtatagatgttgacctggatgagtttctttggctgtgtatctgttgtcagtgaaccaggggaaggaaataccttcaagggccctgagtttactgagattttatatctcaccccttgtgtgggactatgttttgcaggtgattcttccggagtagcagagagatcccaaggcaagaggcctatgcaggattagctgctgttgaacatcctaggctagaggacttgagcatgtgctcagatattttgtattttttttgggttggttggttttgatgtaccctgatggtatatttgtacagttttgtattgtacaatggaactttgatgtatattcaccatattatgatgtacagtgttatgatagtgactttgatgatgtcacttctagtttatgcttccaaactgcttaaactctgattaattaggtgtgtctattgtgattgatttggtaatgaccctgattaatggattggggcgttacattatggtatcagagcagtttgacagggaagcactgtacatatggtgaattttgtgttgtatgtgtgtgctagggtgttcattatggtaattgcatgtgtaactgttgagagtgagcttgatcaactcaccctttttatgtaatatgtccagtaccatggtgaggacccggaaccaggatgagagggcgggtccagaggaacaccctgatccattggccactgccctggctgctatgcagcaattgatgaaggccaatgaggagttgatggctaagttgagaactcggcgcagagaggacagagtaccttctccacatcctattcctgagggcgaggatagtctccagataggaggacctagtcagcatgctgaggggtacagccatctcagaggtggaccctcccagtcttatgtagaggaggagtcagtggccagaggtaggatgcttacagcttttcgtaagcatgatcctccagcttttcagggagagtatgatcctgtagtagcggccagatggttacaggccttagagaagatcttcacagtgatggagtgttcagatcatcaccgacttctctatgccacttacatgcttcagggtgatgcccacgagtggtgggttaccacatcagagcttatgagaggccagggggaggttatcacctggcaggcttttgaggcccagttcctggacagatactttcctagagatgccagagagcagaagcaggcggagttcgagacgcttgtccagggacagatgtctgttgatcagtatttggctaagttcaatgaattagccaaatatgctcatttcaggaaagagttacctgataatgagacacttgcagctaagttccagaggggactcagagaggacatcgagaagaggatagcgggcagtggatcccgagatctggggagtctggtcagacagtgccgacaggtagaggacatgattcggagacggaagggcagtcgctttgctccttctggcagacctgaggaagggagatctggtggtgcaagcccagctgggaaaggcaagggcagagatctgcgagtgttttcttcagataagtttaagaagactcagagagatagaccacctagatcaggcacaccttcccgatgtgctacttgtggcagattccactggggcaagtgtcctcctggtgttttggtgtgtttcagatgtggcaaacctggtcacatttctcgattttgtcctcagattagagaccgggccgtagctgctcctgtgatctccgcagcacctattacaggccggatatacaccgtggatgcgagagaggcagccatagctccagatttgattagaggtacagtagtcattggtttgtgtgatgttagagttctgtttgattctggagccacccactcgtttatcagtgatcacactgcgacaggactggacttgcctatgtccagactttcttttcccatggaggtgaccacagcctctagagagcagtgtagagtggagaggtgttgtagagatgtatatttcttgtataatggcagagagtatagtgtggatctgttttgtttgtctatgcctacccttgagatgattttgggtatggattggctgaccagatatggggtcatgctggattgttgtcataagagagtagtggtgccttcggaggatattagccagagttcagttgcattcctttcagtgttacaagctcgtaaggaactgagaggaggagctcaggggtatctgttattgagtacagcggtggagagacggagagtggatctatcagagattccggtggtgagagagtttgttgatgtgtttcctgaggagattacacagcttccaccggatagggggatagagttctccattgatctggttccaggtgtgggacccatatccatagctccataccgcatgtctcctttagagttaaaggagttgaaggcacagattgaggacttgttgtccaaagagtttatccgaccgagtgtttctccatggggagcaccagtcctctttgtgaaaaagaaggacgggagtatgaggttatgtgtcgattacaggcagctgaataaggttactattaagaataagtatcctttgcctcgtattgatgatttattagatcagttgaggggagcctgtgtgttctccaagatagacctgaggtccggataccatcagattcggattaagcccggagatgttccgaagacagctttcaggtcaaggtatgggcattatgagttccaggtcattccttttggtttgactaatgcaccagccgtgttcatggactacatgaacagagttttcagaccatacctagatcagtttgtggtggtatttatagatgacatactgatttattccaggagtcaggaagagcatgttgaacatctgagacttgtgttacagattctgagagatcatcagctatatgctaagttctctaagtgtgagttttggctttcagaggtgaaatttctgggtcatgtgatttctgcagaaggtgtctcagtggatccgagtaaggtggatgctgtgatgtcttgggagaggcccaagagtgtttcagaggttcgtagtttccttggtcttgcaggatactacaggaggttcattcaggggttttcgcagatggtattacccttgactcgtcttaccaggaatggtaacccatttgtatggactcatgaatgtgaggagtgttttcagagattgaaagagaagttgaccacagctccagtgttgatacttcctgatcctgagggatgttttgaggtgtattgtgatgcttccaagagaggtcttggttgtgtgttgatgcaggataagcgggtagtggcttatgcttctagacagttgaagccacatgaggagaattatcctacccatgacttagagcttgcagccattgtatttgctctaaaggtatggagacattacttatacggtgcccagttggtggtattcagtgaccacaagagcctcaagtatctgtttgatcaaaaagagctgaacatgaggcagagacggtggatggagtttctcaaggactatgagtttgagctgagataccatccaggcaaggcgaacgtggtagctgacgccttgagcaggaaacatctgagtgtggcctgcatgatgatctctgactgtgagttgattgaacagttcagagatatgcatctgacagtgactgagggtaccagtggtcttgagttgagtcggaccaaagttgataatgagttgatacagaggatcagagaggctcagaagcaagatgattcgattatagatatgatgggccgacgagagtttcactgggagcctgatgatttgatgagatatcaggaccggattgtggtgcctaagggcgagatggtagatgcagtcttgaccgaggctcataagggccagttcagtattcatccaggtgctaccaagatgtatcaggatctcagaaggagattttggtggccagggatgaagggagacatcgctcagtttgtgaccagatgtttagtatgtcagaaggttaagattgagcaccagagaccgtcaggtttgcttcagccactacaaattcctgagtggaaatgggatagtatttccatggattttgtagttgggcttccgaggactcagattggatgtgattccatctgggtgatagttgatagactgacgaagtctgctcatttcttacctgtgaggactgactacactgcagagaagctggctcagctatatgtcagagagattgttagactgcatggggttcctgagagcattgtcagtgacagagatcctacgttcacttctagattttggagtgcgcttcaggagtcatttgggacccagttgagactcagtacagcatatcatcctcagacagatggtcagatcgagcggaccatccagaccttagaggatatgttgagagcctgtgccttggagcaaggtaccagatgggatagatacttacctctagtggagttctcgtataataacagttatcatgcaagtttaggcatggctccctatgaggccttgtatggccggagatgcaggactcctgcttgctgggcagaggtaggtgaaaggcagttgttaggacctgacatggttcaagagacttctgagcagatcagattgattagagatgagttgttgagagctcagagtcgacagaagagtttctatgatcataaacacaggccgcttcagtttgaggaaggcgatcatgtgtttctgagactgtctccagttactggtgttggacgggcgttaggtgtgaggaagcttagtcctagattcattggtccttaccagatactccagagagtaggaccagtggcttataggctagctttacctccccagttgtcaggattacatgatgtgttccacgtgtcgcagctgaggaaatatgtatcagatccttcacatgtggtggagcctgacacgattccgatcagagagaatctgacttgccctacccgaccagtgaagattttggaccgcacagaaaagaagatcaggagtaagaccattccaattatcaaggttcagtgggatggcagatcacctgaggaagcgacttgggaatgagagcaagagctgttacagctgtatcccgagttatgtatcaggtatgatcttaaattttgcggacaacattcttaaaaaggggggggtgtaatgtaatatcttgaattttaagtatgtgattaacactggttaagcctaaattaagtacgtgttaagcttaggattaagcttatgatggaggaaatataattaggccttggaatcccttgaaaggaggcttaaaggtttgataaagagttgaaataggctgttctggcctgcggcgcgacccgcgtgaagtgcggcgcgacctgcgccataggtataaaacatgccaatactgtctgccatcccgcgcgagtagcgtgggaactgcgcgagtagcgtgggaagtgccctagaaaaccatgttttcctctggagctccacgcgagtagcgtggatgttcacgcgagtagcgtggattggcagtgctgtggcgcgaccagcgcggtaactggcgcgagccgcgcgggatcggcggatttgcttttatatgaaaccttttgggcagagagggagagaaaaaagaaaaaggagaggagagaatagagagaaacctccattgatgagcgtttgagcttcgtaccttcttcatcgttcatctaaacacctccgacccaactgagaaagtgattagaaccccgagaagagagaaaacccccgattgattcttgagaatagctgagaaatagtgagattgatttctctgagagaacccttgagagctcggagtttaaagacgaaagaggccgtgattgagcaagttatcttagggaaagtgattccctagtgtttctgaacattacagaggtaagaaactcgagctctaaccattggttctgtgttttggatttcggggttttggggtaatcttgaggggtgttttggaggtgttagagccgttattaggctcggactctgtagagtcttatgctcagagaactgttctgaggaagttagaaccttgaatcatcattattgatgaagtttgattttggctctgagtcagtctgagcagagataaaaggctagttatatgactagtatgaaccttaggacagttgacaaagttgctcatgagactatatagaggagattgatcggttgaaactggtgattgtgagaggttggttttaagcagaaatatgcttaaccatagcttgatcagatttttagtagagactctgtagcctgatataggctgagagggatcctgtggagggtcagatgagcacttagaaagtgattgggttgtggttatgaaaggatgagagtttcctttcatttgaacggtttaggaccgtatttgatgtgttatatctgtattcttatgtaggacgtgagcctgatagctcaggtggtgttgaccacgggaccgggagagccggtgactttcccagagcaggtaagctcttggttcttgcttgtatgtccttactgtgttccaccatactcctaagggggtaatggttctgttgagctgttatgcctgtgtttggcatttgtgtattgctctgattgattgatgattgatgtttgtaccctatgagagggtaatggctatgatttgatctgtaatgcttgccatttgatctggatctagaaagagatgataatattaatcgtgcatagttattgattgtttagcttatgatatgcatgattgattgtagaatcctatggtaataggatagatgacatgtatttgaaatgagtttcatgatggaggtcggcccggtatataggagtcctcctaacatttgttgtacctatatacttcggaggtgcctctaattgactttgataggtagtggtatccatcggaatcatgtagatattgatagatggtgatatccatcggaatcatatcagtattgatagatggagataaccatcggagtcatatcaatgttgatagataagataactatcggaatcacatagatcagtgatagatggtgataactatcggaatcacatagatcagtgctagatggttataactatcggaatcacttgataatgacagatgggtgttctttgactgcatatctgctgattgaacgagtatagatgttgacctggatgagtttctttggttgtgtatctgttgtcagtgaaccaggggaaggaaataccttcaagggccctgagtttactgagattttatatctcaccccttgtgtgggactatgttttgcaggtgattcttccagagtagcagagagatcccaaggcaagaggcctatgcaggattagctgctgttgaacagcctaggctagaggacttgagcatgttgctcagatattttgtattttttttgggttggttggttttgatgtaccctgatggtatatttgtacagttttgtattgtacaatggaactttgatgtatattcaccatattatgatgtacagtgttatgatagtgactttgatgatgtcacttctagtttatgcttccaaactgcttaaactctgattaattaggtgtgtctattgtgattgatttggtaatgaccctgattaatggattggggcgttacaataagaagacgattttcgtaaaacgtctttgtaggtcaccattcaaagacagttttcacgaaaaccgtctttgtttccctttatttttttttaatttaaattaaatgaaaagaagacggttttgggaaaaccgtctttgtaggccaccattcaaagacggtttttacgaaaaccgtctttgtttcccttcattttattttgtttattttaaaataaatgaacagaagacggttttctgaaaaccgtcttcgtaggtcaccattcaaagacggttttggtaaaaatcgtctttgtttcactttatttgaaattttttttattttaaattaaatgaaaagaagacggttttcccaaaaccgtctttgtaggccaccattcaaagacggcttttacgaaaaccgtctttgtttccgtgcattttaattttttttaatttaaaagaaaggataagaagatgatgttcgtaaaaccgtctttgtaggctaccattcaaagacggttttcacgaagaccgtctttgtttccctatttttttttattttttttttgaatgtctacgaaaattgaaatatatttgtattattactaccaaataaatttaagaaatacatcacattgtcataatttcattctataataaataaataaataaataaacaaattgaacagcctggaaacactaatcaactaatgcatatacaactcattcaacataaacaaagactaatgcaatcatataagaataatgaaatcatatattgcaaatatgaatttacaaaaagtcaaaattgtataattataagtgaaatattatcaaattacaaagtaacatagaagatatgcctttactttttttccacccatccaagtccttcaaaagcaaattatagacgaatatatttatctccaattgatttcactatctggcaagccgactcctacagccatgcaaaaaataagcatcacctcaacaggtgtagcagaaaaccagactttttttttccagattaatgacaaagaaggtgaaaggaattgaaaatggggaaatactctatgttgctagtacctcttcttcacctaatatattgtacatgatagcaagattcaattgtgtgaggtctaggcgccatttcatttagtaaaatctgtgaagaaacacaggcatggtcacgatcaggggattaacaaacaaatttacttgtaaaaagaactcaagacaacagtcaagaaaaaaaaaacattgaggcatatacagagttgatgaagaaaaaagtcagaacctgtccatccttagtcaagaacaattcaactgcaaacacaccagcaccttctagagagttaacatcattgaaagcaatttcagctggaaactagaagagctgatacaaatagtccatacctcattttcgctctcagtaacaacacttagcaattgtcaattccgggtagtagaagccgatgcctcatcatcatcaaattccttgatggacttgacaatggggaacttctttattttttgtgaaccacatatgaaatctcttacttaccataacaaccacatacaaagcaacaaaaatgataagcattgctggacacaagtactacaagagtacgtgcagatgacacacaaacaaacatagtagtcacaatgaatatatcttaataacaatcaaaatatattcaacaactcaacatatccatactaggtcaacaatacaaaaaatgaggtatatatcaatcaatatcatgttactagtaatgttaagccgtatataacaaagtttgtagcattgtctcatcccaaaccattcacaatttaaccatagtagtctaggtctgttactagtaaataagagatttcatatgtggaaataagtagagtacctataattgaatctaatgtatattgaagtgaaaaacctctttctaaaataatgcagcaataactcacctcccatcctggtttagggctaagggctggtgctgccatatactcactgataagaaagtgtccttggctactgtgaccagacaaatatttgacaaagaatcagtcagtctcgtataaaggaccttaagaataaactcataaatgccattgactatgcatatatgtctataattgtttacctttaagatctatcctttttagatactcaagtggcgaaagagaaattcatttcagccccaacagttttggaaaatagccaaagtaaaaccattggatcctggaaatttttccttatccatagtccagatacctctaattgatattatttaatttttctaattttaaataaaaaataaaattgttatttaaaatatttttcattaaaacttgttatcatgtataatcattaaaaataaaattaaaattaaatgaacaataatttagaaataatgatattatatataatacattttaagataaagtttaatttatactgttaattaattaaaaaattaacatatatactttaaaaattattcttaagataatttctaattcattaagaatataagaatgttaacaatgataaaaaataaatccatttacaagatcataatatatatacctcacgacatcttccttaattatagggaaaagcatattatttgaaggataaaaagagagaaataagcaagataacataaattcaattcttagcatcctatatgtggaatctgaaaccaaaccatgggcccaccaatattcaaatctgccaatataatcatgataatcataaagttaacagtaacaatgttccttgatcttatgattcataagaagcattgcggtttattagcctaaactatttcccagtcaaagtttaaaatacttcctggaagttgcacagccaccagagcaaattaatcatcatcaaaattttatgataagaaaacatgactaacagaaactagccagtagccagtcactgcaacaaagcaactctcttcatacacacaaggccagaatgggcaaaaaaccctttcaatttcagtttcaaatttcacaagttatattcaacatcattcttatattcttaattatataaaagtctagtagtcaaaaatgaaaaggattcttctagaaaagcaagtgctaaacaataataaaagccaacccactgataacacgttaatagaaattaagaaaatacatacatcctcctaatgtcattggaaccaaagtctcatatgactcattcaatgtgatgaccccacggacaccaagctcctttaagcggggaacatcaataggaaatggaacatcacctaacaatatgaactgaaaattaataaaagttttcattttttgaagctcttctctactttgaccatatctataatcgatttggaatttcaacataaagttttaataatcccatttcagtgcattatatttatacagggcatgctcatcataaaagtgattctcagatggtgtttctaaatatagttttcaattaaatctccaatgccttgattattgcggttatgacataatttatatttcctcgggtctttgatatatatatatatatatatatatatatatatatatatatatatatataaagactaaacatgaataattgaaaataaactaattaaagatacgtgaataaaaaatcacagggaaaggaatttttaaataaaaaaaatcatgaattaataggaagacctaatgaataagcaatcttccgaaagaaaagaaatcccaatataatatatctctatagtaaatcccagcttcaatctccatgtgggattgaggacagaacaacaagaaaatgatagttttataattttatactcatccttatcaataggataataattgacataggcatcattattacttaaaatactagaaaaaatggtccatgaaccagctttccaaagacatgtgtataaaagcctgcttctatgtcctgcagacttgtctaattttaataattgattttagtgtgtgtcattccacatgcattgcttcagtcttctgcttcaaaaacaacatctaccaaataatttttaatcggtcaatatagagcaatatacacattcaaattgaaggaacgaaaataattaatatagaaaatgaaaaaaaaatgcattcataatttttctctgaaacattaacatggacatcaatgaaaaacatgagaattaattgctatgaaacaagaggtgttagatgattttgccgcaagcaatattttgtgatgttacaacagaccaaactctgccagtcatagtggttcaatcaatatgcaataggtgtcctgtactcccatggctatttgataaccaaccaatcaaacttaagtcaggagcaaaacaacaacacttatttaggaattcaaatagtataaatatttaatatttataaactttaattgcagattgaattaaaactagaaaaaataattcatttatgatttatgggggagcagctggcaagattactaacagcaatgttacttttatacatcaagttttaggaaatataagttattgagatataggctttcaggaatgatgccgttgaagaactcagaagttacactaagataaaatctgaaaaaatagaggcaacgctcacaaatcactttgaacaggtggaatcaatttacaatactagttgggaatggaagtacaagcattgcatgacagagagtgagagaggtatggattaggggtagaagcctgagttctgagttcaattctgatgtacacacaaaaccaaaaagaaaggacattaaacacccaatagaatattcagaccccacacgctcttcctttggtctcccaaatgtaaagagttgcatgggaatagcagacctataattatcttctacccagaaactcgtatcatcacttacctcccaagaaaatttatgttcatcaaagatgaagtgaaatttcttgaaatttcttagataatatccaaatattgttctgtgattttagatatcaggactaaaatgtggttagatatcatttgtccaaataataaatcagtgcccaactacagaagttaaaataacaaacatgcataaaggcacaatagctctggtgcatttgtacctttctagattttatgagcttcctttcaagctttgctttagcacgagcctgtcttcgcctcagaattccttggtactgtttggcattcacatacacaggttgttgagccatctcaaggggcaaaggcattctggcatgaggcattcctataaaatgatatgcatgaatcaacaacaattgatgctattgaacaaagtcatcaatatttggaccatgtatatatcttaaaaaagtgagaacaataatggcatagactaacaattgaatgaccaacaagttccagctgtggtgtctgagtagctctgggtaatttaaaattttcatggggaaaactagattcgagcattcagtaaatccagaaagtcatacagatcatgtgaaacttcaatctttacatattatatgcaaatcccaatatcataatttattcctctagaaacatgtagccataatatatggatacagatgtaaagacatccatttcagaatatagagctttcatatacaacaattcaagtgtagatataccactaattagaacataatctttatacaattatactaccaataaaagggaagggtactgaacagcctgggaaactagttactactatgcacactaagaagctactcaactgacttcagatcataaactcatttagtttactttacataattagcccaacaaaataaataaagaaatgaatgaaaaatcatgactgtaaagtagttagcagacaacatatagatttccaacattgagtggtacaactctattatttttgtactattggatacgctcttaagatccattttgctcatcaactccagagtttagtttttttcttatataaatataaattgtgctacaagtgaagatttggaaaagaaaagatgggtggtttgggaatatggatgggtttggttagcctgtgttttgtgtctgtatcagctagttcacttagccttgtggtcattggagactgaggaaggaaaggaacatacaaccaatcccaagttgccactcaggtcttcatcctctatttagtggcaacttatgttccagtgttagtctagtactagtaccttaactaagcacaagtttacaataatgcctaatataaaagatgcaaaaatagtcctctgcaatttgaactcaaccatgtactgaattcaagcttattaaaactgggaagaactttaccattgacaagacactatagaagcaaacatatttgattattaaatgtggtagatagcttgataaaaaaaataattcctatatgatacaacaatgcctactataaaattgaaagatgcaaaaaaagtactcttctgcaatttcaactcaaccatatactgaattcaagcttgctaaaaatggtgaaaaaccttacccttgagaagaaattatagaagcataagagtttgatgagcacaaacactacccgtaaggctgcccaactcttttccctggtccagttcctgagaatttgttctctcttcctcagtagctgttgcaaattgtttactaggtgttctgctatcatcaaaatccaggtcagctgcttctgaattagagaaggtttttatgcagtctgaagcacttagcgctctaaaagctactgagggaatgatgaaggaatgtgatccttacatcatcgttcatctttgtctagaatatgctgaccagaggaagttaagcattgctcttgatcatgcaaagaaactgattaagcttgaggatggatctagagttagtgaatatgagtatgacataaggtgctcttacccgtaatgtggatttatcccactggttccatatcctagttcatgcatattggttttcccaacaagtaggcattgttagtcataggtactcaatgatcaataacatgtataaagttgtgtgagccatgttagaaatgtttatttctctaaagaatgattttacatatgtaaattgttaattagagtccttgttgtaagcaatgcctgggtaagaatttctcatgaactcataagtacaaatattaaattgagtttaaattaatcatagacagggagccaatagagacagaaaaatccaaaaataatcttagagggcctagctttattttacatgcatactggatcaaattttggtcaataattaacctcatagaacaaaacaactctgcttttgcttattagagaaagaaatagaaactgaacatatatcgtgctaaaaagaaaagctcaactatatgtcaatgtagattttggaatgcaacaacttataactaacgcatggtatcctcagagattatgttattcattttattcatttaaagtttcttgctgaaaccatatatatggcccaagggcaacatatccaatatacggtcaaatcattcataactgtcaataatttctcttgttaacactagagccaaaattttaattcactatcctacataacatacacagaaataggggccaatacaatttatgtgtgcaatctcaatatgatttacttaaatgccattactagtagtttctaaagttgccttttcaaatcatataccccaagggaaacacatcccaatttagggtcaattcattcataacatgtcaataatttttctatactaaaatgcagatgatttaaatgtgtttgaatatgatttactaaattggaattactatagtagtttgtaattaatgtttatcttgtgttccaacttcacttccattttgagtggaaatagaaatagtctttatctctggataagattttccattctgaattactgcttcaactttggaattatactgtcaaaccagcaagatggaattggaaagcaagaaaaaaaggagaaaaaaattacaaatttgatagtggcaacaaatgtggataagaatatagaagaagatgttctcatttcaattctgtaggaactacttcaagttaaatttcaataaaagaggaattacaaattttgagcaaaataaaacatgattcattattgtcacaggaccataatcacccctactattgttgaagaccaacaattaggcctctagccaacaacattaagataacaatataatgtcattaaatttcactatatttttcatgtcagatgttacattattttaaccccctattatcaaatataggcatatttttcttctacattttagctgaaccgcaatcctatattgcacagttaatcatacctttattttcttgaagatatctctgaatccctgttctctaaggacacactcacgaagtctgcatagaatccagaacacctactccaaggaaaaagagagaaataaatgaaaataaagattagatatgtaccaaaaatgctacactttattttattatttgataaacacagaaggggtaggtgtgttgttgaaacaaaattgtatatagctaatgaacatacaaggatatcaagaagcctgccttgacttgtaggatctttcttgaaatcttcaagtattctagcataccttttggcacgaaacgtatcagcaaaagaggcaatgttaattccactcaataactcccatattaatttgaattacttgaattaagatactacatcaatataagaagagttggataaaacttaagattcacaagaacattattcctatctaattcggttatcatgtaggtcgttgtcatgtaacaaacctctcaaagtggaccctaaaaagtaggtagtaagagacccacctttgaccaaaattttcaactttatttgcagcatcaggattggagactctcgctctagtaacacataattattctcaaatctactaattaactacccaccgccaacattggcaatgtgaaggagatctacaaactaaaaaaaaaaaaaaaaataccaaaccggcaatttgcctagagaggatgatgccatttccatatttgcctccaaatccaaacttcttccttgctttttatttttcctcgtactgtttattttttttcctttcttaaatctgtgtaaaataaaatagggaacaaaataattaattaaaaataaataaaaattaactatgctggtcgaaatcgaagtggaagctggaggtgtctctcaaagcaggatacttaacaaagatccacggaatagagagaaacacgaggcagcacttcgtgaggtagcacggtgcgacatagcacgaagcgggccttgccgtagccagcaacaccgacgccaagggagatggagagcatattaaacatggtgtcgtttttcggagagagggtgtgacagattgcaaaagtagagagggttcaagggtgagacagaattcttaccttcactgagagtgagagaccttcgagtaaagcattccttccactgaacacgtgaacagctttgagggtctgagagagaggtcatgagagagagggagtgactgaggttagtgagaaggggctagggcacaacacgaattttggacggaaatcgcaatgtttaattttaattttttaaatgaaattacaaataaaacaaagacgattttctaaaaaccgtctttgtatgaggcagaaacaatgacatactttgaaagaccgtcttctttttatccccttctacaacgggtaattcaaaaccgtccttgtaaacttccagttaattgcaaaaatgccaccgcctcacatacaaagacggttatgaaagaaccgtcgtagcttgtgtgtcgttaaagaggctttttgtagtagtgcatgcatccctaaacaattgtcatcaatagttaaaactgatttattaactaatgttgtaatgccatctcctgaactaaagtcacatgcatctagtactcttttaacataatccaattcccttcctttgaaagaagcatgcaatgtcgagaaaaatgtttttttttttcattgaatggcaggctatcataccttattctaagaactttttgaacacctggatgcggactcctttgatatttatccaatgcatccttccaacaacgtattgcacgattggacaaatcttcaatttgttttgggacaactctttctaaaggcactatgacaaaagagctccaaaaactcttggtcatttagcactttgacttcatatctcttttcgatcagactaacacctagcaaatgtttatctctcgttgttatggtgatcttgctcccaggaccaaaccaatcacgttcccctgccaaatttttcatctgttcaatattgtcatcaacatcatcgagaactataagaactcttttgaacccaagtctattttttattgttctgattccttcttcaatgcttttaaactggattttgctttcctcaagtatctctgacagaagctcttcttgcaggtgctttatgccctaaaattgattcgaggtttctctaatattggaaagaaaacatgaaccctcaaactgattgtaaattgagtgatacaaagctttagcaagtatggtttttccaattccacctgttccacgaatccctatcaggcaagtgatattacgggactccagttctagaagtgacttcaattcttcaactaaatactctcgtccaaccatatggtcattactagatatctttaggagatactttaatgaaaatcatgttagcaagggagggaaacaaaattgttagccaatacatttaaatctttcaagtttgaaaatttccgaataattacattaaaccatgaatatgtttcgagtctcaattctctcactttcattcttggccctaaacatattatgaaatttagtgacaatctgacagtacaattggagatagtattaactgcgagaaatgaattctctaataacatgtgcatggtacgcgattaagattataactttaatattattattattatttttaatgcactacttaataattcttttactttatataaatatatgttaataaatatgtatataaatatttaattaacatataaaaactcttaatattgatatatatatatatatatattcaaataattttatattcgcatgttatatcatattaatttcaataaatgttgttttaaaataataaatatattcacgattgtgtaacttaaatatatacataattttaatacgaaatattaataataaaaagcatttcaaattttataatcaatcaattattagtttttttttcatagaaaataaattaaaataaattagggagtgtattacactaactacaataaagtttcataaaattacaaaaaaaaaaaaaaaaaatcctactttttttatctctacactaacactctttagttgtttaaaaaatattatatccacacctcttatatgttacaccgaccttttttaatcatttaaaacatattacaaatatagcaggtttttataaatgttaaaaagatagagtgtttatataattttgattactaccaaaagaccttttaacaacacacgttctacgatggttatggaaaaaccgtcgtttggacgcggtggcagatttgaaattaatggcaactatccaatgacggttatacctgaaacatcttggaaaggtcaaaacaaagtgatttttaacaaaaccgtcgtcgttttacacaaattgaatacgattttggtgaaaatcgtcaatgtaccaaattcatgtaatttacttgtcgtgccctagccatgcctgtgtcgtgttcatcatcagtctcgacatagaaattgacaacgaccgtcatcctccacacgctttcttcggccattttcatcttctaagcactacccaaaagcttacaaacctatgtttagagttgaatcagctataggcgcgtttgttcagtctcggagaccttaaaacaaaacgtttcattctcagtccgcctaagttcaccgctacattgggtcgatcggtgttgaagcagccatcgtgttgttgacggcatattgttgtgatcattgtggtacgcaactacttccatttagtactacgaatttaaaataagaagcatctgtatattgtcattcaatgaacatgaaaataggtagaacttcagccatttttttagataataacttgatataatgttgtatatcaaggattttactaacccaatatgtgatacaccctgtacaaaaggccttcactgaatgtggtaccattttattgtttttgtgtaaataaaattgtacattcagaggtatccatgaacctaattaggttctattcgtttctatgtgattgtaaaaagcttttttaattataccaactgataaccattgttttccttttcttctatgtggcttaattgttgacatttatgctacctatacttttgccgatgtcaacaaatgattctcattcctcacatctttaagtgtataatcattaacaaaacccaagcaaggataattaataaacaacttaagttttaattaattcaccaaaaaaatatttgtcttaaaaggtgttttgtgaataaagtttccctgtaactacacaagaggtatgtatgttttttaattagggaatgatagattaatatataaagtttaattatatttccccaacatatgtttgtgttagtggttaagaaacattgatgatgatgatgtagtggtgtgggggaaggttaaattggattcgagaggtacaactcatttctcaggagcacttttagcaacatcaggccatatgcagtttagtctttgcccattgcttgtagactaggcaaggaataaactacaaatactctgtaggactaaatttgtcaagctcgatcatgtgcaacctttaactaagtttagctttttcctttagaagaggtgttcaaaattagttttcgttagtgtcttcaatattgatataaaagaaacatatgtgtcttcaacattatcattttagtttccaacactaagtttagctactcttattccaaaataggaaactaaataagtaaatataattttaattgatttttgtagttaaacacaaacaaacaaattctattttctctactgttatgacaatatcaattcctattttatttcttccaagtgcaggaaaactccaaggacttgtagcttttttcctaccaactgcgttcttcccctcaccacccccatgtgaatggtctacaaggttcataactatttttatatcttgttatttatcttcaacaaaacagttccagatttcatgttattttaccattgtctggtacctctcttttatttctattcactgtatttatttatcctctgccaaatgacccattaatttgacatttgagcttcccaatttggcaagtagcatggctcaccagtaaaataaggacgtcgatgatataccaccataataactcatccacattaatccacagtagtagaaacactcactttaccctatccaacttggttttgttgcacctgtctttcaagccattttatagcaagtcgctgcaattgttatgtgccttgcaattacattttgtttatgtaaagaccctcaccgtggcgcgggtggcgccagatcccacgctgatagcgccgggatccatcagcagaaaaccctgttaagggtgtggcacagatagcgccagagctggcgcggatggcgccagactctctggaatgtggcaccaggggcgccagggccgcgctgatggcgcgagattctctgaggtccacgcctggagcgccagagttggcgctgggagcgctattgggtgtggactgtggcgtggatcgcgcggggaattgcgcggaacgcgccagaggtgctctggaaagtttaaattctctggtttttcacgcggacagcaccaggagcggcgctgatggcgccataggtttgcagctggcgcggataacgcagtgtcccgcacggattgcgcgagaaggtcggtgcagacttattaaaggggggtcgcgtttgggagaagaagaaaaccattttcttcttcctcccagcctccagcagccatgggagagcttcccaagctcccatgaccttgcctgatgaccctaaacgcttcctgaaccctttaatcatcctagaaaccttgagagagcgagaatccttcctccatttcaccaaaacctccatattttgaggaacctccagagaggtggatgaaagcttgagtttggcgaggaacggcagtggtttagcggcaccagggctcgggagagcagcccagaggccttcctcatcagttctgaggtaagaaactcgagtttctccgattgattttggatttgggggtttcctgtgaatagtgacccatctgtgatagggctagaattagctctgggtccagttgagagaagtgtttagaatgatgtgaggaggaaggattagctttcagtttgtgatttggtgactgttggttttggctctaggtgagggcatgtgtgacttggattgagtcacttgatatgagacatgccaggccttactgatgggcttgtcgtgcctgagagggccatggtaacggtgtcctgtgatgtgaaccgttcaagcccaagaaaccctgagagtttgggttgatagagcttttgagctcactgttgttggcttggtttgagtctggaatgactttgaggccatggatggatctgagatagaccactgagggtctatggaaaggcttgtggaggatgagcctgatgaatcttagagtagatgactcaggttgagggaaaggactgtggttccttcccagaggcagttgatgactgcttgatgagcttgtgcatgtttgatgcttgtatggtctgtgatatatgtgattgtatgccttggtagggcttgacatagtgggtgtcggaggagcagaccatcagtggaggatcgagctgtgaggcacgactagccaggtaagctcatcgttctgggatttttccctcatcttggtttgtcacccaagtggggtgaagattgcatgcaatgtttgatatatatatatatatatatatatatatatgtatgtatatgcatgcagttgagaggaaggccaatgtggcctgttatttggttgtatatgtgatgtgagcctgaagggctataagaacgggacttggagtgaaacccagaccgttctagaaagatgaatatatgatgaaccctaggatagacactcagacagtgtgagggtaatgagacacctgatatggcaggtgtgaggccgtgggccttttgagggaatgcagatcatgagatggtctatgatggaacctagaggatactggatgagtatcaggctagttgaggttccctagccagaggtagagtttgaggactccctggaatagctgagattccttgggaggtgccactgctctctacttaaaacctaaggacagatggaactgtgtggatgttcctccttaggtaaagatgttgaagtcctggacggctattcccaggcagtgtttatgaagtcctggacggctattcccacgcaagtgtttctaaaagtcctggagggctattcccaggcagatgataggagacggcaattgaaaattatttgcaatcaactgatgaattgctcattttgtcgtgctaaaaatgaatcttttgaaatcaatcaatgtgtcatattgtttcctcaattcctccttgtcttttaccccttgtctatgtgttttctacttggcttgcttcatttcctggatatatatactgaaataagagtgacactgtgcaagaatagggtattaaggtggtgtcatgagacataggagaatgtactaacataagatttgttctgtccttgaagatatgaatgtctagctgaatagctagcaggttaatcttggatcaataaccctctccaaggtatctatggaagagatatccttaggttaagcatatcaccatgcactttgatatcaatacaacatttagccaattgaggtgaggtgtctgcacagtgacaacatataataaggtcgagagagaatgaatatacatgtgagtgtacctcttatttataagggtgttacctctaggttaattgttgtcatcttgtgattagataagatataacctcttgattagataagatatactccatgattgttgagattaggatatctgtttgttgagatctccttcgacgaccgttctgcacgttgttgagatttccccagttattgttgagattctgagctaatgggcccttaatgggacattttaataggcccatatattgggtccataacaatttccccccaacctggctgttgaggcttctcgatagtcagggcgtattaattgacataatcccgtcttctatctctgacgggttatgatttgcacacaccatttccccccactggcttgtcaatttgcttcttttcttgacgttgattattttatatgaccatccctagtaaggatggttgatcccagtttttcatatatgccgagttatttctttatttctacccctggatttggtcagtcgtgagggctccacatatctctcatcatgaataaggaacatctttccgaaagttgcttttacttatgtcttatcattagccgtaacacactgttggcgttttgcttttccccttcaatgcatacgtgcatttaatgctatgtcatttcatactgcgcgctaattatgaaattttgaattgattggtcttttttgccccagacatgatgcttcgcacatgtctgatggttatgcgacgttttgtacgcatctgacggttacaattgcacacacatgacagttacgcaatgtttcacactaatccgacggttacacttgcatcctcctttgtgtctatataacccttcttttttctttttctataaagatttgataacccggatagggatctgatttcccttatccgagtttcagatgaatattttaaatcacctccatttagctccctcacaacttcatccgaacagttggggtttcataaaatcttttgagcatttttgtcagcatttggaaatccccagtactgttcctcttttattttatcattttactgtccaaactggtaggacaggtagggaacccacgaataggaaaggatggacatccatccggggtcacactgagcgtaagctctttcatgtatatagagactcctttaaaatttttaaaaacaagtatttcaaagttgtcgccaaatccaacaaacaacctttttcctttgttctcctgattccaaggatgtagagtagaaatttccactctattggtcccatacccaccataagtttcctccttccacctaccgtttcgaggaaacgaatttgtcagattctgatgcttgcttggttacccagatagttgcttataaggaagctcacggccatcccagcatttcttcctttattcgcaaatatcgattcaggtttcccacacaatcgagtatgatcatgtccacttttatttattatacacgactttgcttgttttaactcttcctttgcttttattttgtagtttccgatttgggaaagcaaccagcgtcctcctcaacttcggcttccggtccgggaaagcaaaccctggctcttggtcttggaaagcaaacacccccctacttcaaccttttgccacccgatcacatcgaggcagccacggtaacctcaaccccctccttttctcgctgctctagactcagggaaaggtgatgcggccactagtcctaggtcaaagaagcgaaagctttctaaggcctacaaggaaaaggcaggctccggttcctcaaacaatgcttgctccaacaattgtctcaccctgggctcctactgctcaaatggcgcctgctccaacagtcgtctcacccccggctcctgctgcttaactagctccggattcctcttcttccgttgcaaccgggttatattacccaggtccctttgggagaagggtagttctgaagaactcttccacgttgttcaagcgcccaagcacttcacgaatctggttcccttctccgatgctgaaatacaggagcttggcctcatagagctgagtaccctgaaatgctcatccctggttcagagtctggcgactttgaagaccaggtatattaaaacatttaatgagcttcaagcttttctagggaggaaaccaagaagacttgtgaggaactatttatggtcagaacatggctgcgaataagtttcaagcatcctaggaggaaaccaagaagactcgtgatgaactacttgtggctcagaacacggctgcagaggcacagtctgacgtggcttctctacggaaattgaatgtcgtcaccactaaaatttttaaggatttgaatgtgttgtatgacaaactagagaagacgcataagcaaactgaggctgagctagaatataccaagactgatgctgctaatttaagaactcaactgctgaggggtccttcaacaatacgctgcagcagattcgctgtttaaaccccgagattaagttgtataccactagtatgcacttcaaagatttcgttagtgatggaaagttgatcccttctcctcgcaaagattcggtgactcaagtggatgaaggtcaaatccacgaagaggaagaggtgatccctgccaatcaagttgatgaccaagctcaatcccgagcagtttgagtatttgaagggccgggatgtcggttgtaccttgtaatctttttcttttctttctggggactttgagccccttttgaatttgtatcgaatattgccaggtttgctcctggtttcatttttatcaacactttgcgtaattcttttacttatcttttccttactgcacgtattcaaccttttttagagttccgatcgcacacatgaatccatactacatcggattctattgaatgatttggccaaaatcaaaaatattttgcgcagtctgcataaatatccatctagtttcaatgaccaggaattttattttgcaaagattcctttcgttttacctttgcaacatgttctgggttatcatccctgaacttaattctgacaaatatttgtttgctacatgtagacgtttgatttttcaaccaactctgcctacatttcaacctgatcagggtttaaataacatatttctcttttgctaagataataattttgatgcatcatacacgcgaaagtttttactatttttgcttatcttttcacaatccggccataatgaccggtttcctttgctaccaatttttgtatatgcaatgtcacaataaagacaaaaatgctttatttatttgcaaacttgctataaaatggctcatgatctcaataaaggagaaacaacattgttgccaaattacagcttatgaatcctgattaaaggaaacttgctaaaaccacagcttattgatcctaacaaaggaaaaatattaatattacttgccgaaaccacgacttattgatcctaacaatggaaaaatattaacttgggatgaaactttggaaccggatctaactgtaatacgttgttagacttttggcaagcgtaccgattctcgttgcaggttacagaatttataaagatcgtctccgcagggacttgagctactcagtcaatccaaatagaattcaacatttcaatagttatgtacaataaggataagcggaaatttcatgtgattacgaaagtaatgaaaaattacgaaactagcaaaatgaaatttatttacaagaaagtaggattgggtttcatcattcataccctctgtattcaattaaaattaatatatatgaatcattttctacaattactgatgcatacatttagtcaccccgcccgaatcgatcccttgcattcgagaatcctaaggatatttatcgaatgtcgatccttcgcatacgaagtaaataacccagcattataatcataatctcatgctatttgcaatctaaacgttatgccctattcctagcaacaaaacgtaaagagtaaaatcattccggcaagttgctttgccgctagatccaggcaatgtgtcatgacccgaatttcgtcaaccaaatcaaactctaaagccagagcttcattgttcttttcttcttcttcctgaagaacgttttttctcctccaagatggttgaccaatctcaactggaatcattgcctcacaaccgtacgtcaatctgaatggggtttctttgttggatgtctgaacagtgttcctatacccccatagaacgtaatacagttgctcgacccagctggaaccgacatcttgcataggcttccttaacccgtctatgatcactttatttgtagcctctgctttcccatttgacagtgagtgttctatagaagcgaagtgatgcttgatctggaatccgaccattatctcttggaacctcttatcaataaactgagttccattatctatcactatctctcccaggatgccaaacccggagatgatgtttctatcaaagaacctctgcacctgggctaaagttatggtgttgacaggttctgcttctatccacttagtgaaataatccactgcaattatcagccactttagttgtccttccgctgccttgaattgtcccaacaaattcattccccacttaaaaaatggccatggagtcgagatatacttcaacttggtaggcgaggaccatattatcttggcatgcttctagcaactttcacattttctgacatgactctttgagtcaacttccatagttcgccaatagtaacctacccgaagggctttccttgctaatgctctggcccccatgtgttggctgttaattccttcatgtatttcggtcagcacatactctaccctatctgggttcagacaaaccatcgtcgggatatgtaaccctttacggtacaagtttcctccacaattgtgaacatacatcatcacacaccaatttcttgacttctagagcatcatctggcaggattcctctttcaaggtaatcaaccataaaccttctccagtcttccacagccgaggttatcattacacaacttggttcagaaacttcctgctagatcacagtcctatgatttctcgggctcctagtgctcgccagttttgataagatatcagccctggagttttcccctcttggaatgtgattaactataatttcatcaaagtcggccataatttttttgaccttattcaaatactttgccaacaagggccctttcacctggtaccgcccttcaatctaagctgtgacgagctaggaattggtaagcacctttacagttttggctccttgttcttttgcctaggttaccgactatcggtgcttcatactcagcttggttttttgatgttgggaagtttagcgggagtgattgctcaatggctattccttccgggttttcaactatgatccttgctccactccctttgacatttgacgatccgtcaacatataccttccaaacattagtgtcattcccagttcctccatcagaccgagttagctccatgacaaagtcagccagtgcttaagattttatagcatgtcgggcttcgtacttcaaatcaaactcggacaattgtactgcccagttgatcatccttccagctaaatctagtttatggattacttgtcgatttggctggttggtcctgataatgattgtgtgaccctagaagtaggggcgaagcctccttgttgtcactaacaacgaaaagctacttgttctaacttttggtaccttaactcgaaatttcgaagggccctacttacaaagtagaccggcacttgggcgttcttcgtctccctcaccaatattacactgcccgcttcatctcccacggataagtataatatcaaaacttctcctggttctggctttgacagtacaggtggagaaactaagcattttctgatttccttaaacgcggcttcgcattccgggttctaagatagatagaacactagaaatcttctggtatgttacaacctttggaaatatcccagtggaaataggaaggcatatccatggatcttgataccactttacccaaaaatcctagaagtttggtcggatcatttcattcccattagtatcaggtatttttggaaaaaagtcgataagttaggttataattaaggttgcaagatttcatgaaatctctagtattgtgtatgatgaagattctagactatgggaaagcctacatagacctctagtaaccaagttggaactaagtttagtctaccattcaataaacaaactggaaattaagatgtcaacaattcatcttatactttccgagtttaacaaatttcgagggcgaaatttttgaaggaggggagaattgtaacaccccaaaattttgggaatcacagtcaatgactagggtaaaatgtttattagaggcagtacaaaaatttaggaaaaatgacgaaataccctagacatttcaaaaatgaccaaattgcccctaggcattttagctagatattttagggaggaaattttataaatatccttggatgtaaccagaatacccttagcgtgacaatttcagagataccctgaacattttagaaatgacgattatacccctagggtgagtggtgaaattaccaaaataccctttaggtcaaaaatgaccagatgactttagaaatttgtgggaatctgagtattggataaaataattttagataatcaattattaacatggttggtggcaggaaatcataaactgtaatttctaggaattttggaagatattttgaaaagaacttaatctagactacctcaagtatcagaaaattataagaaaaggatagatataatctatagaattttctattaattatagtaaaaatagacattcctaataagttagtttagtaattttaataattaaaggcaagatggaccaataggaagcaagaaaaagccaattaggaaaacaaaagcatgaaatatcttaaccaaagaccattccacgtgagaaatgagaacaagcaaggattgctctccaagcaatgaagttcaacgtgcaagaaggagaagagtgaagaatattcaagacttggacatttgtatggtcaaaattcattagccaatggaaagtaaacaagtagaaagcaagctatcatgacttaagatatttgcactttaaaagagtaggaaccggaaataagcttagataaagagggagtatacgtgcaattgagaagaaaaagggagaaggatgtagaaacaagccacttggaaggttaggaatggctagccaataagaaaaaaccaagtagaaagctagccatcataacccttggatatttgtaataaaaatcaaacttaatcactctataaaaagggagtaggaactgaaagtttggggctgccttaagggagttcaacgtgccaaaaccactccaaagcctttccatttcatttctttttaattctaccttttacctaaaccaaaacaaaggcctacgcccttggaaacctcacgtgaagcactagcaatcctaggagcaaggatcattcaatttcgaagaaggaaagctgtccaaaagcttaaagaaagcaaggtatggggaagtttatgataagccaagtttgaatattaatttatatgagaatccttacttgttttcataagaaactaagctttacatgttaggtgtttgatgaattgcctcaaagagcttatatggttatttgattaaagtaacttggtttagtttaacaaatgattattggataaataacttgaatccaatttaatgaatgaaagttaaaagttattaaaagtagaagtagtatggctatctttaagaaaataagttgtttaaaattatagttgtctaataaaatatgttgctataaatttgatgttggccgaaatcctcctatgttttcttaagtatagatatttaatttgatgctagaaattggttggaagcatgcttatcatgttgaactttataaagattaatgtttaagtagctttctttaaagtatcctatgaattcaagcttgcacatcatgtgtttgataatttgttacaataaataaaatatgttcaaaagtcgtttgtttgaatctttattgttggatttgaattatatttgcatggttggatattttagcaaaagttatgtattatttcatgtgttgctgagtgttttcgatgaaagcccaccatgtgtttgatgacttgcctccaagagataaaaatattttaagaaatgaaatatctgagctttgatgaattatgacttgttctgagaacattatctatggttgtataactatgacttacttttgaagaatttagggagttgaactatggttgtatgcttagatgttgtgtaaagctttacgtgttgtataaaaagcatatgccatgagttgtcaaagatgttgagctttgaggtgaatgtgatatgaaaataataatgattaaatatgtgataaaagaaaattattcatgcatgtttcatatgcatatgccctgctggggttaagtcgtgttgccctgcgggggttaagccgtgatgttgacctcaagaggaggtgtcagatagctgaggattgagacgagcgtttggacaaaaggtgtctaaactgggggtagccacagtggggagatcacctacccatgatgatcacatgttgtgtgggtgtgagtccttttgcaacactgacctacctcgactgatcgatccaattctgtgccactgggatggggctatcttgactatggccatgagatgagagtttgagagattcatgcatcatataaagaagatgagcatgcattacatgcatcacatgatgggtatgttgtatgatgttttgtatactgcatgtgttgtgtgagttgaagttgcatcctattttatgattgaggctttgaccatctgtgtatataattaattgtttattcaaactatgtttgtcataaacttaccctattttgtgtctatggttgacacctgtgatgaccccaattcatctgggcgagcaggggaacagcaaagcagtggatgatgttgaagaatagaggatgaagatgttttaataaagtgtactttaattatgtcttgtaatttggactagacgtttaatcagttgtatattatgttggattgtatcctggactgtattaaattctatgttgtattgatggattgtatttaccgtggtgagaagaaattgtttatgttacgcatgaattgtaaaatcaaagaaagaagaaagaaatttttcatgaaatttataactaagataattctaatgcaaagtcgacacgagatttcatcaaaaatcaatcaatcacgagagagtaaaaagaggcgttacaaaaactgccagtcgtccggtcagttgttgtgcctcttttttatttgctggaggcttcatggccaacatgactttacacttgtctcggttggcttctattcctctgtgggtcaacatgaaccccaaaaattttccatccggaacaccgaatgcacacttgatcaggtttagccgaatgttttattcccttaacttgttgaatgtttcctctaagtcctacatgtaatcagcaggtttggctgtcttaacaatcatgtcatcaatgtacacttcaatatttcgaccaagttgatgcttgaatactctattcatcattctttggtttgtggcccctgagtttttcaacccaaaaggtataacattatagcaataattcactttcttgcctataaaagccattttatcctggtcttccgggtacattgttatctgattatactcggaataagcatccataaaggacaatagctggaacccggatgagttatccactaactgatcaatgttgggcattgggtaggaatgtttagggcacactttattcaaatcagtgtaatctgtgcataccctctatttgccgctgggctttttaaccatcaccacgttagacaaccacgtagtgtattggatttctcgtatgaacccgccatccaacagctctttaatatgttcctctagtgcttgttttctttctggaccgagtttactcttcttttgcgctatgggatttgatccagggtacattgacaacttgtggcaacagaaattggggtctatccccagtatctccgaggccttccatgcgaaaacatcttgatttcttctcaggcactccaccaatttggattttatgaccaggttgaccgccttaccaaccttggtgattttccagagctgatcccctattctcaagtcttctaattctcctgtcggctctagtctcatctcctcagcatcttttctcatgtcaagttccaccatgttaactggttttcctgacttacattcctcaaccttccttccgttctagtctccttgatggatccggggtggtgaggatggactgcccttgctatccttgaccgtgttgtagtaacactacatggattctttctggtgcccgcaaattgtaaccacttttttcttgttccccacgaattttatcttctgatgcttagtagagaccagcatatcccacttggatagttcgcctccctaatataccgttatactgtgagggaaagtcggccacaataaacttgactcattctgacttaaatgcctccttggtgcccaaggtcatcctgagctcaatgtaacctttgggtttagtgttttccccatttaacgctattaacattgttttgcatggcttcaagtcaacttcgtcaagattcattttcttaaatgcactccaaagaattatattcgcgtagctgccattatctacaaatatccttttaacccggtaattaaccagtgttccagtaattaccaagccatcttcatgatccggcactacgtctctcatatcctccatcgtgaagtaaagtagagggggttcccatcttggtaattttttctttgaacttaggttgttctctcactgaaagaacctccttcaaatacttccttctttggctggcggtatctcctcctcctcccaaagctccacagatgacattacaatcgaactcaggttctagaaattcatctccatcaacattttgcttttttgcttttttcttctttatcattctcgtttggtcgggtttcgtactgacccccgcctttgcgcttgttcttgcgaccctaagtctttatcacatattgccttaatctgacatctctgacaaactgttcaaccacatcccttaaatcccagcattgatcagtggaatgtcctaatccattgtggaattcacagaaccgggattaatctactcccgccttattgtatattggacgaggtcgatctacctttttcatctcaattgaagctacttctcgccagatttgtgatcgggatgcgtttaacggggtatgctttgcatatttggcctcatactttcctggcctaaacctgctgtctaggtttcttccttggttgtgaccctcttgctgctccctgtcccttggagttgggcttcttcttctaggacttcttctttctttctctttgtcaactgcattagcaatctccatttgttctagctctaggtacttttttgatcaagccctaaacttcatcaaatatttcactggatccttgtaaattgactttgccagccgggatgacccatccaattcaacggtgatgaggtgcacatgcactttttcttccaacccttgcacctgcaaggcagcttctttgaaacggtccaagtaactctggagcgtctcaccaggttgttgtcttatcttcccaagtgcgaattcggacttgggttgtttcttactagtggcaaagttcaacagaaacttctgcccaaaatcctcaaaattacagattgactgcggtggcagtgtatgaaaccacgtttgcgcagccccagataaagttatagcaaaaatctgggaattaatgggctcatcaattcccctcacacatatctgcatgtcgaactcatcaatatgcacttgtggatcctggctttcatcatattttaacaagaaagctccatcaaagacttctaggtacggggcattaacaatttcatcaatgaagggactgttgttatgttgccccctactgtatttcctcttgtaaactccctcgtgcatttttgggcgaggtgcaacttttctggctgggcccgctacatctcggcatcggtggatgtatatataaatgagggtgtgcacatgcaccccttcattttaaaatattacatataattatctaatatttttatattttgtccccctaattttatatatttgaacccacagtgccatgtcactcctaactaactcaatattttgttccaaagaaattacaagaaactcaaaaaaatccacatatttatatttttttaataaaaattaacattttttcagttttcataaatataaattaaaataaataaaacgaaatgtgtaacaatataagataaaagatatgcaactaatttaagatatgcaactaatttctaccagaattaaaatttgaaagggcgaataatctggtgaagatttgaaattgataaaagggaattaactaaatttcacattttagtaacaaccaagcaatattttcttaaatcaagcaaaattgttccaaaaataaccgttcaacccttgctttgtccattatctagaatcgcttcataaatcaagaaataaccaagaaatacttaatcaagcaaaattgttcccatagttttaaaaacccacacgcgtccaaggggcaagctttatccattccagaagcttcccaaacggccaaacctcacgtgttcccttctctactctctcttcttcaggctccagcattcacgaaaccctcacttttccactcactcagccttcagctctctgctctcacccttctccacccacaaaacgcaaccctctcctctcttccactcattaaggtgcgtgaaaaggcgggggttccatttttttttgctattataaatatttcaaattacaaattgttaatcttactattattattctttttatattttattatctctgatcgtgattaatattttttaaaaatcttgaatagatcatgaaaagatttttgaagagaaaattgctatcaaatgagcaacaaccttcattggaatcttgtgaatcaagtctttggcaacaacaaattgaaattaatatagatgacttgccatcagatccaagaaagcgaattaaaattccagcttatcatcctaatgattaagataagatacgaagggcatatttacaaagagggtcgtgtcaacctactcaacataattttcctcaaagaaaaattgaaaattctttaagaagattttgttctcttggtttaatgaatatggcaactggttaaagtatagcatggaaaagatgctacattttgtttattttgttatctttttaggcctgattttgggaagcaattgggtggcaatacatttgtgatagagggaagatacatttttttctaaggggatatcacagcgtggaggtaaagctcaaattatcacaatagagcatcactatcttgttgaattattttatactattgtggacatgcagcttcaagaacttaatgatcgttttactgagacaaatactcaattgctcctttgtatggcttgtttaaatccaaccaatttgttttctccttttgataaggcaagactaattgaatttgcgaagttttatccatgtgaattttcttcaactcatttagtgatgcttgatagtcaacttgagacttacatcattgatatgcatggtaatgttgaattttcatctttgaaaggaatcaatgatctttcagagaacttggttgaaactagaagacatattgtttatccattagtatatcatcttctgaagttagcattgattttgcctgttgccacagcaacagtggaaagagccttttctgctatgaaaattgccaaaaataggttgcgtaatcgaatgggagatgcatggatgaatgattgcctagtgacttatattgaaaaagatgtgttcaataacattgacaatgagctgatcattcaacgatttaaaaacatgaaatcacgtagaggccaattataaggtatgtaatttatttgattatatataaaaaaaatttattattttaatgtttacgtctttatcttcatgtgtatgataatgataattgtcaatttttatttttttaaataaattgccccaccgacccagggtcctagatcagccactgcatctcagtcttcctccgcaatcaggttctgaaccatcattgcaggttcttgaatgccatggatcacaactagacttgggctgtttgatttgcttccgcagtagcagtttggggtggagctactgcttgcatacgaaccgcatttccaatgtcaatctggactgggtttgcatcttgagactgggctggacctccagcattccctcgagatgaaacctcaatctccatccgattgactggtcctccaaaatcagcccgggccacacttgtgttgcctctttggtctgcatgccgactttgctgtccttgattctcattatgaaccaggttctccatgctcttgaagcattgctctataagctggatacgctactcttcttcatgcctcaatgcggcattacgctccttcatctgttgttctagttttctgatatcttcctgcctttgcaaggcgtacctcctttccatctcatccatttgggccaagattgaattgagaacgttgctcatgagacgtttgttgggctcttgaaccatttgaatttggttcaggcggtgagcatctacctgattgggtgggactgtccgtgtcgccggagcaggagtggaggctggatctgaaacctcttcacttatatagatagcatcatagtccaccagttggggtggtgccgtgttttgatctcgaaggggtagtggattcacctcctccaaaataggatttgaaagtaagtctctccttatgcctgcctcagagcttgggtgtgcagtctgattattacttctcgtgtttaccatcgagaatgtgggatttgaaatttaacgtccccataaacggtgccaattgttatgtccttgaagacaggaatgtctagctgaatagctagcaggttaatcttggatcaataactctctccaaggtatctatggaagagatatccttaggttaagcagatcaccgtgcactttgatatcgatacggtgtttagccaattgaggtgaggtgtgtgcacagtgacaacatataatagggtcgagagagaatgaatatacctgtgagcgtaccttttatttttaagggtgttacctctaggttaatttctgccatcttgtgattagataagatataacatcttgattagataagatatacttcttgattgttgggattaagatatctgtttgttgggatctccttcgacgaccgttctacacgttgttgagatttttccagttattgttgagattctgagctaatgggcccttaatgggacattttaatagacccatatgttgggtccgtaacaagattgaatatgtaattgaatttgaaacctagttgatcaatactttcattttgatttatgaagattcctctacatttatccaaaagggatcttagactgtaaaatatttaatttgatgtccaatgttgtaacaatgtaggacctttgacagtaaaaaaactagtcttgagaatcaaaacctagttttgaagtggtttctggatttataattagatttggataagaatatggatttataattggattcttttcttcttttgataagcaaatttataattgcatttgactgaaagttagtttggtcaaaaccaaaccagttttgaaaatacaagtgaattattattgaaatccaatccatatagttggcttattaatggatttggtttgcttttatgctaaacctatacatatccatacttttatgtctgaggctgttgttgtagcaaaaaattggtcttctcgttgttgaaagctacaaataaagtcacttatttatcattaactcgatttcaggttcagtaaccgtaaattttctcattcacataagagaaatccaagcttgtggattagaagaggttaattttatcgattatgaagctatggtatgttagtaattgtctatcttgtttcttcctatcaaacttgttgtcgggttctaaagggaaatagagaagttaaattttttgtgtattctttattgtttagtttttctatgaataacataaaagggaataataaactttttgtaaggacttttattttcggcgcttaaccccgcgcgatagcgcggggattcaggtcagaaaaccctgctaagggtgcggcgccgatggcgccaaatgtaatagcttgaattcgtaagcatatgtttaagcttagtttaagcatgaatctaagtttttgggttaaggaatatgatcatgctttagaatcctctaaaagatacttaaaaatgcaagtttatggttgttctggcatatggcgcgaaccacttggggtgcggcgcgacccgcgccatatgtgtaatataaggcagatggctctgccatgccacgcgattaacttgaagatccacgcgagtcgcgtggcaagtggtctagaatcatggtttcctctggggctccacgcgagtcacttgggatccacgcgggtcgcgtggaaggcccgaatgaatggcgcgagtcgcgtggtaaaacgaggcgagtcgcgtgggaagtggcttagaaatggtatttttgtctgccatcccaagtgagtcgcgtgggagttcaagtgagtcgtgtgggaacgtcggcagatcagaatttaaaggccaaaacgttagaaatggaaggaaaaaccatttcttcttcctccctttagccaacctccattgttgaagtcctaaagcttcttaggacttgatttctcagtctaaacacttccttgagccttagaatcttgattgaaccgattagaaagcttgaatccttcatcaaattccttgaaaaccccaatttgagtgagaagaggaacctcagagggaaaagctcagagaactcgagcttggcgcagaaccacagcatagttggaacatagaagctaggagaagctgttctgaggctgttggagtcgccactgaggccgtgattctgaggttactggtggcgggagccacagagcagggaccagaccacagagtgatattattccaggtaagttcagtgtccctggggatgattcccatcttgtgtgccacaccacactcctggggggttgtggtcatatcataatatacatgcatcgcatttgcattctgatgatgatgacttatatgcctctgtgcttgatatatgctagttatgctgaggtatgattgtattacggactgtgattgtgtttgatatagatagatatggacctccctaggagatggtttcctcctagtatggctggctcatgggtgatgatgatcccggggtgatgatgatcccctaggccaagggaatagttcagatggtttcctgctattctcggaggtaccatatgtgtacatccccgttaagggtagcgtccggtgggatgacacaggtgtgagttccggcctcacactgggagatggtttcctcccattccaggagatggattcctcctgctttgtgatggatataggagatggtttcctcctatttggtgacttgattataggagatggtttcctcctgctctgagatgtgtagtcaccttgtatgatatgctgtgtgattgagaaagccagagggctaggctagtgggccatttgattgtgatgtttgtgtatatgtattgtgatagtgggccaggatggaggagattcctccatggatcctgagcttactgagatatgttatctcaccccgtgtggggtttatgtggtttcaggtgaaccatcaggaagagaagagcagtctcagggcaagaggcccatcagagactagactgctaggctgaggagcagctcagagagcatgaaggctctgttttgatttgttttgttttagttttgtataccccttctgagggacgatattcttttgtagcaccatgtgtggtgtgaacctgtgatgtatatatattgtacagtacctggatatatgtatatgagactttccctgagtacatgtgtatgtttatattgatgttactctgcctaaagctttgttatctgtcttgctatgttgattttgataaactggatcagcaggggcgtgattttatggttctgttgtgtgattccatacatgatgtatcaagaaaacgatcctatgtttccgctgaactgataaattaatatttatacgctaatctgatattattaatgataacacatcggaggcctacggggtgttacacttttccttttgattttttttttctattatcagtattatctcaatatttatttgtacaattatgcattaggttctttgcaggtatcactactacaaaaggaggtttttaagacggttataagaccccttcaaattatgcattaggttctatgtccatacttagaaagtcagacatacgaagacggttctccgacagtcttaaattaaattaattttttttaagtacttttctaagatggttagtgactcaacaatattagaatcctaatattctaagacggttcctcctcaaactgtcttagtatgtttgcatttctaagacggtttatggataaccgtcttagtaggtgtacattctaagacagtcatagatacaatcgtctttgtttggtcgtttttgtttttttattcctttggttcttattttttatttttcaatttgtaatatgctttaattttaaaatatgaaaacaaatacccaaatgattgaagcagttgcctccatttaacataatctatattagtgaattagtatacatagctgaaaaaagatggacaatccaacaagttgttctaaatctcaacacaattaacacatttagtcatcgataaagaggtttatatattatgcattaaagtatgcctttagagttggaaccaaaaacaccaagaacaactcaggcagtaatatatatatatatatatatatatatatatatatatatatccaagctatacaatacaatgtttacaataaaactacaaaatccaagtgttaaaagtgaggaaactaacccaaattgttgctgtctcaatccagtgctccactcttgcactaagcacatggagcttagtgttttcttcattcaggaaaaggttctcaacaaaagccttttggtgtatcatgttccacctcatgatcagtgggaacatgctctcccaaagtctctttgctaacaaaggaaatataaaaatagagtccataagtaaggtaaaaaaaaacctatgatggcaggaaaaacaacattaaaggtaaaattcatattagctgctttcaaaaagcatcctacacataccctcaaagtcatggctagtggagaatgagtagaatccaactgctgttggatagcagttgtgtgcttcacaagtccattttgaaatttgacatcaatttgctgaaacatagccttgcaagacatctcaaatgcgggaacgactgaagcttccacactaatcttgagtgcttcctacaaagtacaaacaaaaccataaaattgcatacaggcatgtctgagcaacaaccaataggtatcaccaaaattctgacagactacaaaatttgactatatctgccttatcttaataacagaattcccaaagtcatgtgaagctacaatggccctccatatgcacatccgaatgatataaggctataaaagaatcactaagacacaacattaaattcttagcatttgataaggatttatgatattaaagtttctaaatttttctcaactacctttaatactcatccatcagtgggtctcaagaggtttaattacttatgatccgtataccaacacaatctttacaatgtagtccctacatctagaaattactcattttagtctccaaaaagtacacactttttaactcaatagcccttgaagctgagctacattatcaatcataaacatgcataatatatataaagcgagagtgttaattgttaagaaggcatagttctgatagaaaataaagtaaatccaaactaaagcaaagaaataaacaaaaaagaaaatgaactaagtgtgaaattgagcacagtcaagattgcgtaaagtagggaaaacatggtatattttgtctaatataaataaataaataaataaaaatccttcaagaatttgatagtagctgatctcagtcaaataaacgtaccaattcaattgaccttatatttatttgactcaagtctttagcagctacgattatcccacacggatttgttagtgtagtagacaattcaatttcctggtgcggcttaaaacatgatttttaacgccggaaactagtaaccctttaaagcttcttttttttcccatcaaatactcctattgaattaggcaaattgaagagctaatcttgtgtgcatttaaggttgacaatactactatataatcacttaatttattgaatttgacaaatgttaatatttatatacttttaagattgattagagaaataaaatatttttattaaaaattattatgttttatagtaaaagcataaaatttttgtaatacctttttttatgtaattaaaattatttgataaaatatatttaatatctttcatattttctttacttcatgtattatgtttacattattcttttcatcacaccaatcatccttattatgtgagttgaagtaattatcctatttgattttaagtaatctccatgttttatgttttatatatatatatatatatatatatatatatatatatatattctataataaaaaatttacattttgatatcaatgtataaaaaaatttatctaggtgaaagaaaatattaaataatttagttaagtgaggatataataaattagaaatgaataacaataacaatttgcctaaacattcttagttcttataaataaataaaaatttaaacaaaatcagttaatattttagaaagggagaacataaacaaaatttgtgagatgacttaaataaaataaaatattttttcccaaagaaaataaataaataaaaaatatttcactgcaatgtaaatataactatttgcctcaattcaaattcaagtttctaacaatgtattcatgtgtatgcgtgaggtaacagtaacttcttttaagagcatgagttaaagatgcttacctgcattccgcagacaactatttgttctccttcatgaagaacatcattaactaaatcaatagtagtttcatggccttcaactactttcacctctaaaacagtgcactggtggccacaatcaacaaacaattaggtccctatagtcaaattattatacagcattcaaccagcttttatattacgcaacaataagctaacctgcacttcttcattgtatgtaagtttctcaaccattgttttttgggtccattaaactaccgatacaaaacataaaaaatgtgggataaacatacatgtattaaattaaaatttaacatacacatcaatatagtataaaaaagaaactattcaagtataaatttaactccttatctataaaaatatataataaaaaaatcttacctaaatgtaaaaaaaaaaaaaaaaaaaaaaaaaaaaaaaaaaaacactatagtacttgtctttttcctaagttttatttttttataagtattagaatttattttttagagagtaaacttatgaatatcgctacttatggttaatacaactttatatatatatatatatatagagagagagagagagagagcattcttagattgttaattttcaattgactcaaatttatgagtaccaattggcactagcagtgatttgtgataacagtacacctgaaaggtagaattgtttaacatgaattagaatttgtattgttatcccatatttgctgccaaatacaattaagagaagcaagctcccataaatatcattagcatgctgtaaatatgactcaccttaccttatgtattaattgtaagacagggtgatactggtattctctaattgtacacattaaattcgatacacgacctatatatgaactccaagcatcttcactttgtataaatgataaagttggtgttccaaaacaaataaaatggtagctgctacattcaatatgcataaccttggcttgaagttaaaccaatgaactaattaccagtcaaaattttaagcagtttccacaaaaaacaatccatcacgattgcaatattagcttgatgttatgtgagattagcaatatcatttattgatgaatattgaatgatgaaagcattaacaatgctaagtgagattagtctatacgtaactccattttatgaacaggctactaaataatcaagtaacccaaaagagaataatcccaaaaaattaaagaactagtttccttgcctgcatgtagtgcaggatttgaaatatttttccggtctcatgacaatcagcattcaagggaagtagaaatcggactaatatttcaaagtcaatgttatgataaaataaaagctatacctcattagattctgaaccacatgcaatgtatccatccaaaacagatattctcacgaaattctggagaagaagaaaaagataatcagaatcatgaactataaacaaattagaacaaacaaaagacaagaaataaattgcagtactcttagttgctttagaaagcttaaagtaacaattaagtagttaatatccctggaaagctagaaactagaaagtagttatccttgagaaacttaaaacagatgctatggattgaaatcctaaacggctgatcatggaataggcactcttaatgtgttagtattttcatttcatagctacaacatacgtagactaaaaatgggaggccatgtgtaatctgtttcagaggttgcaaagtgacccaccattcctatgcaacaattatgatgtacaacactactactaccttacaacttacaaggcattcaaaccttcaccaactttgctcagagaaggccagattcaataaattaactagtttgttttactatgaacaaaagaaacattggatgaagtcattattaaatcataggacagcttacctgaacctgaactgagtagcttgtgtgattgccatgattttttgttgagggtattgccaagtgcatcaaagagaggcatgaagaggcagaagttagtgtccttatcagtgtggtgtaggtggtgatatctgcatcataacatagaaagcaaatgaactatacatacatcatgatataaatagaactcatggtgtaaatggatgtgcactcaccagtcttgttttgcataaaagcagagaaaggaggtttagcacagtttatgttcgcatcttataaatgaaagcaaagatgcaaaactgaaacaacagattggctgacatatggtcagtgacaggtgtaaggcatccatgattccgaagtcacagatttgaactttgaacaaaggaatcatggatgatgaatttgtgaatgggtggctaatctaaggtttgaaagatacaagactccagacatgtgctagcagcaatttatgggaagcagtaaagtacaagatttttttatggtctatagttagtaattcatggatagaataatggtttaggttgtaaacctgtagaggttttgggacctcgaggggcttagggtttgggttcctatcatatgaatgtaacagaatgaaagaaaggcaaaaaaatttagcagcatcctcctactctggatcaatggaacccagaatgaggagattcgcttattaaattagtctccaaagaatcaaaagtctggtctctcccacccaagactaaccaaccaaccaactaagtccttccacttatattctctcccactatttataccctacctctattacagcatcagagtgctaactaacaacaaatctctaaatactttaactatttatatcctaccgctatcttttgcttctgtatttctgccaacaaatataataaaagaaatattgtattacttaccatttaaaaagaaaacaaaaacttaccaacaaattttcaataacccaacctccttaacaaaatagaaaactaaatgattagactgcacagaatagattagactgcagcaacaatagatcagtatacagggcttatttaacatacaatcaagtctggaatagttacatcattcaaatgtttattccagtgattgtccaatatgaggaatccagctattaatgcaaagtgagagacctaacattaaagaacctggataataagaggaacaagatcaggatcgctcatgctaagatttatcctctcatccattttcaacttcccagcattaaaaccaaaaagcctacaagagaagttatcatgaaattgaattcagccacaaccttctggactgataatgcttcaaatttcaaaggatcaaaacatagccatgcagagccccactgaatcaaactatgaaatgccaacaaatccacagatctacaacttataaagtataaaccttataaatgtcatcacattcacacttgcatcagagcaaactagtgaaaaacaacataataaattgcagttacaaatcaaaagttgaaatgaaagttgggatccttaaactggctacttgaaaatataatcattccaaggtaacattgtcaataacaacaagtgttaactggaacaaaaaaaataatttatccattcctctaactcatcttagtaattgtccattctaatagacttgtctgttttggtatatatctaaatttttttaactaagtctgtttgaaaagcctcatataatttatctcaatgttttaggtacaacttaaatttttattgagtgatttcacttaatgtaaatttattttaagataaaatataactatatttctacattacatttttatttgggtctttttgttggattgtcataattcaaggatttaattaaaaaattaaatagttaagaaattatcaatagatcataggcaatgcaagtttccattaatagttaagaaagataaatgaacattacaacttaaaagaaattatcaattgaaacatttcaaaaatacagaatacctttaaataccctgtacaaaaagaataaaagcaatattatagttaaaagtagtaaataggtcttaaaaaaaatcacaagattatttgtataaatagccatatacccatacatgcagacttaattaaatagaaacataaagtttaagtgatctttacatactgtcatcatcaatcataggatgatatggagtcatagactcttttaattgaacttttcaaagcctcacctggaagttgaatgccaactttatctgaatttgtactccaaaatgaattgcagaacattggattatcctggacaatttttccaagagctgcattcataatacattactgttagctttttatgaaagagagaacataatatagaaattgattattatatttaatacaaggccagcgaccaatgattctatttatttctagaaaaagcacagcgcagggcctcttgaatggggttaggaattagacccttattcaacagcacaaagacatgatattatcatcaatcaaacttataaaaaaagtatggtgtaacatgaataatgcagtaaaaacagaacatcactaatgatttcaaggactgaaatgttgatgtcagccaaaacatataaatgagaagcatttaatcgcatggacttgtatatatggataagtgacattaaaatgagaaaatcttggatccagttactacctcctaatccaggaattattacaagctgaagttcaggcaatcctagctgagcagttggggttgataaccgagcattgcatgcctatatgcgaaaaagaattggtaatattttgtacaaacttataaggaaaaatttattctcctaatcaattggtaatacgtaaaattgcatattctaagcctctacccaaggcaatgccattcatggcaacaaccaatggtttcctagcagctaaaaaatgaagtgaaagatttaacatagcacaaaatgaaaaatgaatagaaaataccataaaaacaaagtaccttctatagcatcaatgatgatttctactgatagccaaccaggtttagcatgctctataaaagcagagaggaaagagttagaaaatgactatattagaaatacacctccaaaagaagtaccttctggcctttgagcaccaaatgcagaaaaaacctccagaaaatgttccctttgcacctaataaaataacgtaatattgggaataacccaagtcccacatcggctagaaatagtgccaagtcagagtatataagtggagaacaatcgtcaccctatgagctagcttttggggttgagttaggtctaaacccacattctaagatggtatcagagcctattctagatccattaacgggccactcaccatattatccactcaccaagccctaaagtgttgggcgtgagggggtgtattgggaataacccaagtcccacattggctagagatagtgccaagtcaaagtatataagtggagaacaatcctcaccctatgagctagcttttggggttgagttaggtctaaacccacattctaagacgtaagattcagttatgaagctgtagttacaatctagttggctaagaaatctatatattttgcactatccagtgccaaacaatggtaccactttcaatatcaaatattgcctcattactaagtctatattgttaaattgagcaaacttaagtgttgtcccttcccagttatttgaaaaatctcaaagcttagactctgtccaattaaaaagaaaattgcaatacctaaggttcagtagtaacacttaggagtttgtgcattacagcaaaccctcacaactgaggctgcttcaatgttgaagcactctctggggttggctcgaaggaggggccatgcatagttcactcctctgtgtgtggctgccactttgctaagccttataggcagttccttgagaaggacttgcctcaagtctcagcctcaccaaatttctcatcaccttcttcaatgcagggcccttgagttgtgcttcaatgttgccctcaacaggctcccaataacaccttctcctttgatccacactcagccttctctccaatgctctcattgctgcattgaagagagctcaggctcaccagagaaggggttgtattgagcaacagcaacaatagcctcttctcaccatcaaggttgagctggaacacctcatcatatcaatccttgatgaccctagtgttagcaaggttatgagagaggctatatagtttgggggagtaatacaccaaattagttaatttcccaaattttaaaactggtaatcattaagtccttaattttgtaattttatggactaagtcgtttaacaacatcagaagctaaaatattcgtcctttaataattttaagcattaaaatgtttttttgtaacttagatattacattaagttaattgataattttataaactaatttgatctattgatcaattaaaagagctacacatatttttgtaatagacatagcttgttcgtagagagagagtgtttataagacagattttaacagaaaaaaaaatagaaatcatggaagttcctgaaaagtcaatttttttaatggtcgattagtgtcctagttttccttgaagattacatttagaaatcatggaagttccttaacagtcaatttctcaaatagcttttttttatgttctttctattttcaaatcctttgaccatatatatgtatttgttgctccatttcaataaaccaatttatatgatgccacatattgtgggaaaggcactgcacaatgtagaatcatcactaacaccatagaagttgcaaagctagaaggaaaaattacaagtgacaaacttactatagtgttggcttgagttttgaagtacaggatgtgggcaaaagatattaaccagtcctgctacaaaatccataacttggctttctgaggagctactcagccttcctcaccaagtatgccattggatattgccaagcctccttaaatagatacctgaaaattaaaaaaaattcaatactcaggataggtgttctccttcgattaaaatttattgttatttattattattgaattaaattaggtacatagaaatcactacttataattaaacaattgcatatactgctagaaaactcttctacacagaacaatgatgcttgaaaagaggtggacttgtaagctgcaaagaagactgcagtagttcctgcaacaacaacactgtaaaatctaaggagacagagaaaaagagattaatgttaaatactatccagctataattactatataatcaattccaacaagagaaacgaacattagcgagagaaaataatatttatatttttttattgtaattgggtcacgagtttagtgttttaaaaaatcatgttaattggaagtatttaaaaaaaacaagtgaaaccaaacaattaatcaattatgcacccagaatcaattaatcaatgtgagcccaaacaagtgaacatttccgaaaaatcatgttaattggaagtatttcaacataatgtgaaaccaaaaaatgcacttataatatgtgtttaattccacaccctagatgtgattttttatgttcactgataagccaattggtataggcttatagctttcacatctcaaatgtgatttaaaaaacacaaacctaatgaatattagtaaatgttagtaaacaagacataataggaaagagagaaaattataccaatcaacaaattgaacagtcctcttagtcttgatggtggcaacagcagcattcacatccttaggaacaacatcaccacgatacatcaagcagcaaggcatgtacttgccatgcctgggatcacacttggccatcatgctcacgggctcaaacaaggcattcgtgatctctgcaccgacaactgctcgtggtaagccttggcggcagagataaccggagcatacgaagaaagcatgaagtggatcctggggtatggcacaagtttggtctggaactcagtgatatccacattgatagcgccatcaaacctcaaggaggtggttagcgacgaaatgatctaggaaatgagcctgttgaggttggtgtaggtgggtctctcgatgtcgtagatggcttccttgtccaagagaacagccacgtcggtgtgttccagaagggagtgggtggagaggacgctgttgtagggctccacaatgcgattgaaacctgaggggaagggtaaatggtgaaccctaatttggactttttaccgtaatcgacggagagacgctctaacaagagagatcggagactggaacctgtgccaccgccgacagtgttgaagacgaggaagccctggagaccagtgcacttgtctgtgagtttccggatgcgatccaagcacagatgatctctttgccaactgaaattgggggaaatcaaaattaggtcagaaaatgaaagaatagttaagagaaattgagaaagagtgagaatgtgagagggggaaccatggtattggcctccagagaactgagggacataaataatgtagagggagacatttaaaaaaaaaaaaaatgcaaaaccatctaagacggttttttaaaaaccgtcttagaatcacagctttcaaagacagtctttgtaaaacccgtcctggaatggtagtttttaagacggttttttcataaccgtcttagaattatgatatttatttacaaaaatgccaccacgtttctttctaagacgggttttgatcaaccgtctttaaatcgccatcttaaaaaaggctttttttagtagtgtatacaatattttaagaccatgtttctaatttattgttagccaacttatattgatttattttcactgactgttgtgtgacttttacaatacccagaagttcgtcttgtgcttgcactgtggtcccattgagtcatttgggcatggttttgtttgttgagggagtcataggctacaaatttagaataatggacatggaagtattttaaggttttttaattaatgacaattgaaagttggttgtgttccattatgcaatgtaagagtttcaactagtacaaaatatgtcacccatgcatacaatattgacataatgtgaatgttttcactagtttgctgtcaaaattctaaataactcaatggttgtagttatgaaggttaattctaaccgataacaaggtaaagggctacttgctcattggttgacaatacgaaagcaaagaatgggttccccagttataggtaatggagagctattatgtggaaggagattgtttctacaagtagtacccgttaaggattttatgattgtaatgggggtaaaaaagttctttacttcttctatagacgttgttacaattgttggcctttaatgtgaagcatcattttaattagttgtattcttgaacgaattgtatagaatttttattcaaaacttcaatccataagaattattatcacatcttgtgtctataaggtatcatcttaaattactttgatttatttattaaaaagattagtaattttattgcactatgattggtgacattgaacttaatattattgcgtttgtggttattttataaataaaaattattcttttaaaaaaaaaaggttttgaagacggttttttctagaaaaattgtctttgaaaccccattttttttaaaagtaattcaatcaaagacggttgtaagtgtaaaccgtcttagaatggtgacattctaagacggttattcctaacaaccgtctaagaaaatggctgtaaaaaaatcaatgattctaagacagttcttaggaataatcgtcttagaatgtcatcattctaaaacggttattcccaacaaccgtcttagaaaatgtgtgtaaaaaaagacacaatgattttaagaggttcttaggaataactgtcctagaatgatgacattctaagacggttattcccaacaactgtcttagaaaatgtgtggaaaaaaaacaatgattctaagacgatttttagtcaaaattgtcttagaatcgtttgttacgaaaatggttgaatgaccgttgtaaaaagtctttactttctacgacgctcattacgaagacgattgcggaaccatctttgaatgtctcaaataaccgatgtaaaatgtctttgctgtagtagtgtttgagggtgattaatgtaatttattcaaattcaaaaaataatgatgaatataaaaataagatgatgcttgtataataatttctttgatcttattttgtttttttaataacaactgagaattacgtaaattcttttaacaaatatattttgtaatgacacatggaattaacctatgcattaaaaaattctcataaaaatgttttacctaatttagagggagactatatttgtaattaactcatagcaatataatatttgtaaaaagaaaatagtataaatttaaaaggtaaaaatatatttttcatctttataaatatcaaaatatttataatatgtccttgtaaattttttttattttttttcattctcaaaaaattgaaatttgttactttttgacccaaatttcggctcagatatctaaacctatgtgtcaatttttcattggttccattgatgactgggagtgactgatttttggggttaaaaatcatcacaaaatgcaaaaaaaaaaaaaaccaacaattttgtaagtctttctttcctttccttcttgcctagctttcttcatcttcttcgaatttaaataaataatttctttttctttttctttttaaatgttttgttcagctgcaatgataaacaccacctcattgacacctgtcatcttcttgttctttgaattttccttccttctgaaaacataacaccttcactctcaaactcaacgttacaaatatcaattccaatgttctatatataatcaaatgtcaccaacaaactcaataatccggctttcaaattcatctctctctctgattagcctagtgaacaaagaagatgaagaaagttagggaaaaaggacgttaaggaagagggatttacaaatttgtgggtttttttcctacattttgtggcgattttaactcccataaatcactcactctcatagtcatcaatgaaaccaatgaaagaatgacatgtaggttcaaatactcgaacctacgtctaggccaaaaggtaataaattaaaatttttcgatgacaaaaaaatactcaaaattttgtaaggaaggattctaaacatttcaatatttatagggacaaaaacatattttagcttataattaaagttttaaaaaatttcacgtagcctcaaatttgtccaagtctagctccggaccaaaaaataacacattttaattttatgaggacaaaaaaacatactcaaaattttggagggatggattccaatgttttcaatgtctatagggacaaaaagatattttatccagtttaaaaacacatagaataaagcataatacaaataaagatatatcaataactattgacatagacttgtttttttagtcaagtggtcaacgatttgaattctaattgagtcttggatctgaaataaatcaagttggccagaaggaaatatttccgatcaataatcgcactgacatgtggacaatcaaacatatacttgctgacaacctaacaagaattaacattgttatccataatttaagagatctaattatgaaatataacattctccttaatcaatttaaaatatttattttttcatgtgtcatattatcattgataaaaatcacaaatgacaaagtaacggtcaactatctaataatttcttgtgcaacgctaccaaatctagttgaaaaaaattacttccggaatatataatagtagtacttcttggatttatgacactacgtgatttccaatttacttctctgtcgtggcctatacttcatttatttaacaccctgtgtgtagaaacaaactcattgagacctagccagcaaagatggaagagcactcatcatcagcacctcacatattggctttaccctttccagcagaaggccacatcaaacccatgtttaacctaaccaaacttctctcccaaaatggccacagaatcaccttcgtcaacacccgccacaaccacaatcgcctcctccaattcacagacgtaccctcattccacacccaattccccgatttcgacttcgcaaccatcaacgatggcgtgcccgacggccatcctccgaacgattttagcgtaatggtgtctccgaccagcaggtccaaggttgcgctagagttccgggagttgttgtcgagcctcgtcgagaaaggttgtctgtggggcccaccttcttgcataattgtcgatggaatgatgtcaacgattgctatggatgctgctgaagagttcgggattccggtgctaactttccgaacgtacagtgccacttgcacgtgggttacgattcacataagcaaagttattagggaagaggcggtggatatgcaggatccaggttagttaataaattagaagtttcaactatagcctatttctcttttgttttttatttatttatcaaaattcaaagttttactaatttatgcgatatacaaatactctctctatatgtaaattactaatttatacaaaacataccatttatgttttagctttctttggtaaacatatttattttatagatatttattagttagacttttaatttttaaattataaaagtataattaaaaaatattagcaacacactcttttaaatacataatttattattaaatcaattttttgttaaaatttacatttttttataaatctcttttaattttattggagtaattaataacacactggagtgagatgcatattggagtcagttgaaccaacaataagttaatcattgtgaatttttaaattgcattggttgagtaaagaatcttttgcttctgttttcttgatttgtcttttctccttttcgttttttgaagcaataaaaagacaacgagatttaaaatatttgttgaatatgtaattcctgtgtagtcagcctgtgccggcaattcagttaatttcaaataaattgatcatatgcaacgattctaatcaaaatgtttaggttgttcaacaattccaatttaagttcaaactaattaaactgaaagaattgtaatactaatcaaaatgtttactaataatcacatcttatttgatctatacagtaatataaaatatagatcattactcttattcttttcacacacttctgtattttcatgtttagactgttttatacatggatacattatttaagtatcattctttttggaaaagacaaaacaattcgtaaatcagaaaacaaaagataaccacaaggaatggcagtcccaaacaagagttacagaaaacaaaaacaagattttagtatcatttaatcatatttttctaatatctactttatataattgttagtaagaagatgtcaattccttatttatcattagttttcaaagtgattgattgagcttaatttagtatattaacaaattattcaatacatgttataatatgtgttagattataaaatatcaaataaaatgattttaagtaaatatttatgaaaaagtatacatttatgtgtttggtctcacattaaataattgatttgaaacctaaaatgtagtttgaatttacaattttgaataagttatatatgtgttagataaaaaaatatatactaaagtttaatacaaacttatttttagaataaaaatatttaaacataagtcgcttggcttcagagtaattttaactaaaatcaatattttataaaatcaaatttacaaacatccacctaattaataacacccagtattagtttaattatttagtttgctaattatctgcctattattgtatgtagaatatataacaattttagtgcaaactgcaaagcacagtttcttaaaagttaatagtttttgctttttcttagaatttccaattagtgcaaactttaaataaaaaaattcaagaaaatataattcttgttagtttcatggcaatattaatttatattaatttacaaatcattaaataggaacatatgtagtgagagaataatttttatataaaagtgaaagagataaatctaagcatataatcatacataaatgacaaagatttaatgtatgtaactttttaaaaattccggcttatataatatatattactgaacaaacaagtttgcattgataggtttctttgattgctgtaaagaaattaaaatggatttctttgattaataaatgctaatcacataaatgatattacagaaatccattttttgtacagcaattagtatatatagaattaaaaaaaatgagaaaaggctttcttccggtcaagatttaatgaaatttggtaatatttaattttatatagaaactttcttcgattcttgataatagtcttgtagaactttactcttattatgcttagaagcttgacaaatttcattaacttgtacttaaaatgcagaagatacagataaggtgctatcaagcatcccaggattagagaatttattgagagatcgtgatcttccatctgtcttcagattgaaacctggaagcaatggccttgaattctacatcaaagaaaccctagccatgactcgagcttctggtcttatactcaatacctttgaccagctagaagcccccattatcactaagctaagtactatatttcccaaagtctacaccattggccctctccacactctcatcaagactcaaatcacaaacaatagttcatcatcccttcatttgagaaaagaagacaaaagttgcataaaatggcttaaccatcaaaaggcaaagtcagttttgtatgttagctttggcactgtagtgaagctgtcacatgagcagttattagaattttggcatggtttggtgaatagtttgaagcctttcttgtgggctatgagaaaagacttgatcaatagaataggtattatggaaaacattaatgtacctatagaacttgagttagggactaaagagaggggacttttagtggattgggccccacaagaggaggttctggcccacccttcagtaggtgcgtttttgacacattgtggttggaattctacattggagtctattgttgaaggtgtgcctatgctatgttggccgttgattgctgatcaaacggttaacaataggtgtgtgagtgagcaatgggggattggaattgatatagttgcaacctatgataggttggttattgagaacatggtgaagaatgtaatggagaatcagatagaagggcttataaggtccgtggatgagattgcaaaaaaagctcgtgatagtatcaaagaaactggttcttcttatcataatatagagaaaatgatcgaggacataatgtcaatgaagataaggaaaaagtattgagtagaacatatgtttctttttgtagaagaacaatgatgaaatgtgctttcttttaactgcaatctaacaatacctatatatgtaataatttttaacttaaaagcttaaatatgtttctcttatcattcttaatataacatttttttttccttttggtccccttgtttatttgtaaataggttatacagtacttccttttatcttaaggtttctgttctgtatgtttccaaaacacaactgtacaaaactaatcggctgagtgtttactgttggatctattctaattctgctacctcaagagtatcaatggaggatgacatctcgaagcagatgatcacagagaaataccccaatggacgtgaggtgtgtgctctgtgtaattgaaagagatagagtcagaatatttgtgtacctttctccatggaggatatccctatttatagctttgataatattgacctgagttagttagttgagtagtgagtctcatccattatctgtatccggagattgactgatagtgggtttagtggctatagtgttgttatctccactaccttcggttatctgaatagttgataagtggcggttataatatttgttatatcttcctatcctttgatggttaatatattaggtatttgaattaataagataaatgagccttttattttggccaaaggaaattaccgtaacagatgccccccagcttggttggtcagcactctgacctgccaagctgtgctagcaattattgttgaatcgaggttgatgaggatattcaattcttgagtttttaaccctttcttgggttttaccctcaagattcaattattgagtttttaactctctcttggacattaccctcaagcaatcaattcttgagtttttaaccctctcttgggctttaccctcaagattcttgagtttttaactctctcttaggctttaccatcaagattcaattcttgaatttttaaccctctattgggctttaccctcaagattcaattcctgcaacttaaccatttttatcccagagggtcgttacaataatttttcttcattatttgacatgcaaaaataataatattttacacatatattattataaaaatactataaagaattatttatgacgcttcatattagaaaagagggagaagacttagcttttgcttaatataatctgtgttgccgctcgtgagacaagatccaccctcataaagtgatattgtgctgccttcttgtgctctccatccatcatattaggattttgatttgcagctgttatgttttcaccattattaggtgggaatcgaattttatcgtttcccatgggctcatcatctgatttagcggcgtggatgaagtctcaactggactcattgcctcgcaactatatgtccggattggcttctatttgtgcaacattatttgattctcattaggggtcggattctccatgtttctccatttgaagcattgctctataaactaagaaaaccttctcaatgtgataagtaaaaatcatgggagctatctcggaatccacccaaattcttcactatcaataaaatgagattacgcaaggattccgacaaccattacaattaacaaacaatttcaacaaaattataccaaaacatcacaagaggtaggcatacaaaattggattatgtacgaaattaattcctaccactaaaaataaaaattaacaaatcccaacggtcaaattgatttactgcaagagaggaacatacttaccgaatttgaggataatctaacggttgataaaagagatacctctttctcaatatcactgcccgaaacatgataaaagagagcaggaattctaataacctttgtttgcagttgaaatattccctattgaaaacactttaatgaatgatccgaatggtcagaatgtagaaacagattttagtaatctttcctcaaagttttaacgcgatccaacggttagtgtaagagaaatgtccctcgcaatactgctgtctgcttcagaaaacggattctgaaccattttggtttgggattttctggtgatgcttcaagcctcgattcaagaaaccaaccgttagatgtgaagagtgataagtcacgaacttgttgtaaaactttaaacaaaatctaacggttaaacaaggagatcgagaagattgaagaatgatagtttctgcccttctcaatatgcgaatttatttgtgtttaccatcgggaacatgggatttgaaatttaacggccccacagacggctccaatgttttgtttatttccagaacacaactgtacagcaaaatatgctgaaagattgttgtaggatcaagttccgactcttctgcttcaaagatatctatggagatgaaataccttgaagcagatgatcacagagaaataccccaatggacgtgaggtgtgtgctatgtgtaattgaaagagatagagtcagaatgtgtgtacctttctccatggaggatatccctatttatagctttgagaatactgacctgagttagttagttgagtagtgagcctcatccattatttgtatccggagattgactgatagtgagtttagtggctatagtgttgttatctccactactttcgattatctgaatagctgataagtggcggttataatatttgttatatcttcctatcctttgatggttaagatattaggtatttgaattaataagataaatgagccttttattttggccaagggaaattaccgtaacagtttcccctttgaaatctgtgttattttcttaattttaagtcatgaaaactattcaccccatactcacttggcaagtcaatcctgtagacattgtaattaattctctcaaggatcttgaaaagaccatcacccctagattggagtttagattttctttgtaaatgaaacttatccttccttagatgaacccaaacccaatctccgggatcaaataccatgatctttctcccattgttggcatgtcgtgcatattgcttcatcttcctctcaatttgattttgcacctttccatggagatccctaacaaatcttactcaaaatagaagaataattaggtaaggagattaaatcaatagggaataatgggttaaaaccataaacgacctcaaaaggagcaaaataagtggtagagttggttaccatatcatcaagtctaggattaggatatcgataccttacggttatgttgttgatgggtctacaatccgttcacattctccacatgctatctttcttagggactagacactactacacaaaaggcctacgacgacgattatttgattcatacgataacggttgttgaaccgtcattgttgtgtgtgtcgttgaaaatgaggtactttcgacgacggttctaaaaaaccgtcatcgtttctattttttatttatttattttttaaagaaaatacaaacgaagacggttattaaggaaaaccgtcatcgtatgtcagcatacgatgacggttttttcataataaccgtctttgtttgcatttaatttcaatttattttttaaaaaattaaaaagctacgaagatggttattaaagaaaaccgtcatcgtatgtcagcatacgatgacggttttttcataataaccgtctttgtttgcatttaatttaaatttattttttaaaaaattaaaaagctacgaagatggttattaaggaaaaccgtcatcgtatgtcaagatacgatgacgattttttgttaataaccgtctttatttgtatttaatttcaatttaattttttaaataaaatacaaacgaagacggttatttaggaaaaccgccatcctatgttagtattcgatgacggtttttctgaataaccgtctttgtttgcatttaatttcaatttaatttttttaaataaaatacaaacgaagacggttatttaggaaaaccgtcatcgtatgtcaatatacgatgacggttttttctaaataaccgtcatcgtttgtatgtttgttctttttttttttcaaatctcaacatttatgaacacgattttttgttaataatcatctttgtttgtttatcaatttttgaaaattattttacacctacgaatgcataacatgcaacaattaaaaccacatcatatattaaaagcatttaacactttctattggaattacaacatcacatcacctaaaaccattacaactttcagattattgtaccaagactatgttagaaaatgctagaaaatacaaaacattgctgaccacttataacatcctatgctgtaactcaacaaagttaacaatcctgagagttcaaaaggaaccaagaatcagttatcagttcaaactagcgatgaaccttatagtcaaaaaataaaggatctgcctaaaaatggataattaagcaacaacagttatgcattggcttggctagttgcactagtgttttataatattgttgcctcagctccataaacctatgaagatagcaaatactaaatcagagatattgtgagcatcggtttagctggtttgttaacagtgattacatgatgggctagtctcataacgcaataatatagaatccatagttagtaaatcacactgtacaaattaattctttcaattgcttaagtcaaggcttttgattgaagctatatctaatacagtatagtatgacttatgcattccacaaacaaaatttatatgttgacaaatatctttgtatggttaatgacatttgattaaaagaagttcatttttgtcaaacattaatcctatgtagaaagccattactgtacctgagcctatcaaggtaaaaaaaaaggaaaagaaaaaaaatttacctacagtaaagatccttagggccaaaaaagcaatggcctgaatggtctttccaagtcccatctcatctcctacaataccatttaaaccctgaaagataccaaaagccttcaaattaacaacaaaatgaaataaatgtttgagactttagcacaacaatacaacaccaaggtgaaacttcagcacaaaagctacagccacaattttcaacctcatcaccaatttagaatcaataggaatttaagtcacaacacattcttattgagacaaaaaaatgataatattcctaacatatttatcttaaatgatatccaaatatagtataattaatcattaactagttactcaaatgaaaaacctatatagtttaattaccagtatgtttggttagactgtgattttagtagaattgatttagttttggtagatgataaagaagcaactctttgtagcttattattaatcacatatttttggtgcgtcgtatagtttcaacgtaaaaccaaacacacgcatattaaatcaagtgcttatcactagaccacaacctttttttgtacttcatagtcaagtcaacttcttcaacatttttattttttacttaagctcgtaagcttaagaatcataatttgattgtattctgaaacatctcagccttctctaaccagaatgctggtctaaagtcaacaatcccccccccccagcacatatcagcatactcataatcttgttacttcaagtacacgcataaataagcatataaaaccttagcaatgtcctcaatttcaggtggtggcagaaatttcaagcatatacccgaaagatatagaggcaccacctgcaggagttgatgacatgacgaagctagcacaccttcatgagccaggggtcctacataacctcgcaactcgtttttctctcgatccttggatattgtcatgatggtacctaaggtataagggtgaaggaaatcaaattaaatattttcacagcatagtcaaagtaaatagcatgaaagctagtggtaattacatagaggattagatttttgtgttttcattacaagtccagtgcagaaattgaaacaaaataagctttataaaccctctgaaaaggctattataatgtcgaattgactctagctagtttgtaaccccaagtgggttcggattggatgcttgaaccatacggaggaaacaaattaagatataggcaaatattaaaatgtataaataaaaaagcaatttcttttgtctggtccatctcctcacagatttgaaatcatacccattcttgccacttattaactagtaagtataattcacaattaaaagcatcaatggtagatcaacatgactaaattgcagagaaaatatagataaaaacacataacatcatagactaaaatccaaggtcatgtcacacatagctgatataacgactttgggtgtatttctgaagatcttgggataacaattaaatgacgatatgggaaaaaccacccctggaatatcagagaagctttgggcacaggagggcacaagagttttcaccaaccaaaggaaagaaaggtagaaaaagaaaacatacttacatttctgaaaaaaggatccaacaagcccttaccattcacttcttattgtgttcttcaagtgctatgtttaagttctaggaagataaacttttataaaaaaagaaatatactcaaggaagtgaggaacaaacactttcaaatgtatcaagagacaaacaaagtttagaaagcagaacactattcttcaaaacaataaacaaacaaggtgtaatttttatttccttctattttctattcagttcaatttttcaaacttatttcttccttttattttctttttgctgtaccaacggagggaaagagccatgaagtggaaatacatagtctagcaatgcattctaaaaacatgaagggcatttacctagacgcttcccatttttaaaagcatgaagggcatgaccaagggaatcaatgtgaaggacagtttgagaaccaacaacatcttcaagatcaatgctgtagaaaaaaaaatgatgtggtaccatggggcagcgaattagaggtcagaagaaagctttctcaaccttgaaggtatactatataccttaataagtaccacaagtgatcacttttataagcagatgcatttatttgctctagtaatccaaattttgagaatgaatcaacctttgaaataccgataggttgactaacccaactccaaaagatatgaatcaaccttttaaaaattcaattttaaagcttgaaatcatacatgtagaattaatgtggcataccataaataactacagattatgctactgtaacttcaacattattcagaaatgggaaagcaacaagaatacaaaagcagtatgaggtgctacattagccaagacaataatgttatatagatataaatgcaaccagacaccaaatgtaaaatccagatcatgcttgtcaacactctatcatatagcccaattatggccctggagcataacaaggggcaaaccttcttgttggatttatgcatataatttgtgcaagcatatcataattaagtaaaatcataaagttataatgatgaaggtacaaaatgcagagccatctactgacctgaaatcccaattaacatgctttctttgtaaccaatgcagctccaagcattacgctaggatttgaagtatttgtacaactggtgatagcagctataacaacatcattgtgcttaagatgtgctggtgtcccttggaatgtgaactctgcaaccttattctgagattcttttggtacagtgaaaccctgtaacaatgcaatattacagtttgaaccataaaaacgaccaaggttgtaatatggcaccagccacaaaatactaaaagcatatcactagtataagtatgcagttaattgcaaaatttgacttcctggtcacagatctgcaggaatgtaaattcaaatttcacccaaggtagtcaaagttgaagggcattcttgaggtgctaaaggatttttttttaacacccatgaaataaagggccaaaacgtgcatacttcacataagataactattaaattaaaaataaaaaagcaaaatatgaatactttgtattaatttccatatgaattaattgaataagcagctcactcattataaaaataaaatattcaaataaaatattcatacatatatttttattttttgactattttatgacctttagaatcacaaaagttaaatggctagcctcttttagtttcttcttttatagaaatatatacccgtaagttgctagaggtgttcctcatctgaaccattaagatgctaaaactagtcactattgtacccttctggccttggattagcacatttgaagggtgatttaatggcggacctcctcccccaaccacatgtaggaatgtgcacacacacacacacacacacagatgctgctactaagagtgcatcgccttttgaaaaatcatgttggaaaagtgaagatatgaaaacttcaacactatagatggaacagataagctatgctactatatatttacccattaaaaataatatgcatcccttaaatccaactttattgttgaggcaaccatgccagtctaccttcatttctctcaaagggacacggtcatgaggcctgaaaagatttaagcaagggttacaccattaaaaaactgaaaatgtaataaagcgattagcttaataagaaacgcctcagtcatttcatattcatttactagtaatatttaagccataatagagttgcatgttgcaacctatcttatggaggcttatattgctaataggttggattggatgctacacatgtgaaggtcattcttaattcctcactttagtggttcattatattttttttccaaatttttgcctgacagttgttattggttcccataatttgcattcataatagtttacattcatcatcactatgaaaaacaatatcatatccattgtgaacaatctgatcatcgttgttttcactttggggttctaggattctttcatccttatccttgcattcaatattttcacaatccttggatgtagttgtaatgactccaacagatgaatttaaccatgtccctatctcagatgttggagatattactgactcaggaggcaacttgtcattctaaattccacttcccgtcaaagccaaagcatctggaggattgcttttgacctgtaggttattgctgttagctaatccgccattaccccgctttgccagcctcagcttttgaatcacaattggaacttcccatgcatttggtctagaattttgagaaaaccagggtcttggagcactgccatcagaaatgctctgtaactgccttgagttgtttacactggagtcaacagtttgcaaagaattggctacattccagctcaggtgactgtttctcaaaccagacactctatacatagttatcaacattggaaatggatcagcacaatcatcatccataattcaattttcaccacctatgacatggagttgatattattatttcaaagaatatacaaaggaaaaaaaacagcttccaatgatcaaaataatgaagcctcgggaatcagggaaactttaaacaaggagatggatggcttaattaaaaaaataaaatcaaatgcatctagcatcagaagttcccaagcaattagtttcacaaaaaatccttacccaagctaatttaaatataaagtgtgacaattgtcataagaaaaagttcaaaagttccaattcatatcaatgaaaccaatttaatgaattcataaactgaatcaatgataaagtgaaaacctttccagcaactaacattggatgtaattccagatgctagatgaagcatgcacaactgctcatttaaggtcactatcaacgataataagtttctccaccaaaaaatagaaactagtttatgatatcatattatccatagactacttatgcatggttattttgatcatggagagggcgccaacaaagacagagtagggcctaattattcaagaacttgaaaagaaacatataatttgtatgtgatcaaacaatatacctttggtcccttgcatgagattttccgacactctttgtagagtaagctgccatgacaggtctatattagaatctgacgttggtaaagcatgggatccaactttgtgatacactgataaaccaggtacaaagagtgctttcttgaagtagacacctacagattcaatatagtctatgtttgttgattattatatttatacataggaacaaaaaaaaaaaagaagagaaaggcattatttatggagcttacccataaataacagcttatgtatgtactttataaatatacattccactgaaaaaaggatggaaaatagcacaatgtttgttatgggttaacaaggcaacaccaaggaggtaaagtgttaagttttataccacaaaagtgcaattttcccaaacatatataaaacagagcaaaaatataaattaatgagggttaaaattgtaaaagaaaaaagaattggcagaacctgtaacttttgaagtatcctaagacgcttgactcatgaccaagaccaaatctaccggacactccaattccccaactaaaggtctctccaccatctagcaatatagacacaagaattgaaaagatattatgaatagttagtgtacaatttatagtcatgcttgctaagaggaactcaataaaaacagtggatcaaacccacacgatgtaatatactatgattatggtagacataagaaaataatatcatgaagcaaatataaattttcaaacaccatcccatcctaaaatttaagccattacatgcaaacctggttattgtctatacattatcttaagcaaaactcttttttgcttgaagtgtggacaaaacacaggtccacagtgcatcatattttttaattatataatataattttacttaaatttacccatacaatacctgagaaacttgctattgctagttctaattattttaagacaacctagattttattgacattcttcatatattctaacaatggccaccagcaagaccctaatccaaagccctaacctattaaaacctaaccttccactgtcatacaaattcatatctagttgaaaaatgggacaaggaaaatcaaatatgaacaaagtaaaccattcaagatttttgtgcagattgcttgagacaaaaacataacaccaacctaattttttgtgcattctcactttacactccaatcatatgtaataaaaccaaactaaataataaattcatctaaaaaatacaaaaatatagaatgaaaaataactaaaatcatctaagtaactaatacagtataaataaatatagaatgaaaaacagctaaaataaatgattgcataccactaatagccactgagtgctctgaacccagagctgccattttaatgttgattccattcaagtattccactttagttggcaaaggcactatgtttggagcccctgcatttcagaagaaaaaaaaacctgttattctttgaacaactttataacatctctgactactaagagtatccagatataaaaaggtacatacataataatatgtccagaataaattattgcaaagaaaaatttgaagcaataataagtacctatcaaatgacaacattaacatgagtcctatggatttctctaacagaattggtttcatactataatataccttttttagcaaataattatagagataaatgatattagctgtctcaagttatagagcttcaataaaacaaagtaaccatgcatggtataataaaaccagctcagtcacaagtcacaaccatacttagaaagtccatgttcttttttttttcttctctcggaaactagctattacatataagaggaaatacagacctacaaccaaccttcatagcaaaagagaatcaaatgcatttcattctcaccaaaaatgtatggttagagcatttttatatgcattgataacaaaagaaagaagtgacttcatgaatgtaccttgtgaaccagaatagtccctgtcaaacctcttcttcctgcaatcccttgaggtggaggtagtgctgtatttataacaagccaaacctgccgaatgtgtggaatgaaggcatggaagttttctgtcactacttttaaaatgttaacagttaaagtatgctaaaacaatgtccgtatgtatgtatacttcaaaccaagaagtcattatcagcttatagacaaaaagaggaatatttggtcaaaaggagggagtgagtggaaggatcgtagaagagttcaaagatgttgaagttctcaacaatttcacccttctggacccctatgacccaaccataaacccgcaggggtagtggtggcgaaacgatgtcatcgtcgcagttagcgttgttgttgctcttggtgtgcggtggtgtcaatcaattaattgacaaacaatgatttcaaatgagaaaagggatcgaagaagtcataaaacctaaccttaatcaaatgggaaaagggatcgaagagggcctgggcctgtatgtagatgtgagcgttttttatggcgatgaaggcggccaccttgttgacgaagaagatggcggaggagtagagatgctccctgcatgcagtccctcaccagtcctccaagcttctccatctcttcctccctcatcatcgaaactttactctttcactcattgcgaactagggtctttgaagggtctttcactcattggagtgaggctagggcacgctgatttttcttaatttaattttaaatctacttttacaaacaatgatggttttaatcataactggcttcgtttagttataggaaaatcacaaaaatggcaccgcttatgaattcaaccttatcaacgacggtttccgtaatacccgtcgtcatttttaaccttatatttacgataatgccaccgcataacatactaagacggttttcatataatcgtcgtcgtatgtgcatcgtgaaaggctttatttgtagtagtgtaggatgaccggtattgtacatgggctcaaactttcattcacccatcctttttacatcaactcttcaacctgcttttgaatctccttggtctcttccagattactcctataggtatcttattaggaagtgacacttccagaacaagatcaatttaatactcaattcctcttaaaggaggcaagccatggggtatgtcttgtaaaaagatatcctcaaactcctttaaaagtgtattaaaatcttgaggtaactcaagggcattagaagacaagcacatataatttggaatgagtaaatacatttgttgtctagctagcatcactttttatacctccttaggtttgatgaacaaactctcttttatcactaatttttttcactctttttttctattttcgtttgttcttttttttcactctttttgccattttttctttttgacttctttctctcaaaggactcttttcttctttgattttcttttctttttctcttttcaatctcatttttattttatcatcacacacctcacttggagacaaaggtgagagaactatctttttacctttatgtgagaaagaatatcgattggtgaccccattgtggataacatctcgatcatattgccacgatctaccaagcaaaacatggtcagcttccatgggaaccatatcacaaagcacttcatcaacatattttccaatggagaatgtaaataacacttgcttatccacaaccaactcaccattgtcactcaaccattgcaatttataaggcttaggataagaggtggtttttaaaccaagcatctccactaatctagtgcttgaaacattggtatgacttccttcatcaatgataagagaacaaacctttccattcaccaagcatctagaatgaaaaatgttttctctttgtgtatcatcttgatctttgcacaagcttcccatgagtcttcttaccatcaaaagatctccctcttccggttgaagaaaaccatcatcctcccctttacaagaggaactatgagagcttttagattactcactatccacctctccattctccaacacaatcatggtccttttgtttggacattgggatgcaatataacccttacctaaacacttaaaacatttaattgaactagatttattggaaggggttgagtaggagtagtaggattacctcttgaagacttcattttaatatgttgtgaagaagaaccctcattcttggaagtgtccttatccttccaagatgaatacccatatgaagacttcttgtaggcttgttttctcttcaattgttgctccaatttcacagccctatgtataagttcatctagggtgttgtatctttgaagctctacaacattttgaatgtccctattcagaccattcaaaaatctagccattagcctcattagtctcttcaatttttgctcttatcaaagaaatctccatctccttataatagtcatcaacacatttacttccttttgtaatttgttatgcaaatttcgtatatattgaggtggaacaaatctctccctcatgattcttttccttatctcccatgtgttcgatctatgtcttctcaatctttctctctccatttgcagttaattccaccacgccatggcatatccttcaaattctaagctagccaacttcattttcttttgttcatccatgccatccctattcctccgatgcttatgtcatttaccatcttcatagccatcatcactcctttgagaagaatgaggtgacctataatgtctccttatctccatgtcttccattctcccactcaaatcttgagtgcttctttgtatctcatcaaatatgtctcctatcctcctttcaacatttctttgaaacttatccatttgtttagccaatgaagccattaggttagcggttctaggggaaggtggatcactatcactttcagacaccattgctacaagaaaatgctagttaaacaaataaaatattggaccttaccactcactaagtgtttacactcttcaacactcgtgtttcacacttataagactttttctataaggttcactcttgtatttttccactcactacctcttcttccgcccttgaaatcaaccaaagatttcaattcaaggagtaaccaaagtgaaagatgaaacaaatccgaactcaacttaagtagtcaaggaagaacgaaaactctaagaaaaaccttggaaatttagaagacaaacaataaaagcaaaaaaaaaatataactcaaaaggaatgtcaaacaagacaaataggaaaaaaatgtctaagtataaaccactgcaattatgaaaaaaaaaatactagaaagcaataataagaacacaccaaaaaagagagctgtaaactttttttttcatttttttatatttgggtcctcatatttttttatattttcattttgacctcaaaatatttgtgttgctctttagtccttcgtattttgtcttttgggactagaaactttgaatatcttttgaagacaaaaggataggataattcaacaaaaagataggatattcaaatctgatatatatatatatatatatatatatcaagaaatttttttgaattgctctctggattctagctctgattatgacatgatgactaccaaggcatgaaatagatagtagaacttacaaataaaaggtggggaagagtagaagatggtaatgaataacaccacgatccttattggaacaataagttgaggaggattcgccacaaaggaaagcttattccttgataagagtcaatttgggttcaaccaagaagaggctaagctctcaatttaagcaaatgcttaattttattcaatcaaaagttattcaaaaatagcaatgtttgagtacttatagagttaagcctctaataaaacctaaaaacatagtttgggcctattttagtccacattgaggccatgacacaaataagaaattactaaattatgacaatacgaaaattatgaaaactaggaaaattacgaaagctacgaaaggaattgcgctatgcacgatgttcacgctaagcgagctcttctacaatcttcaaggtgctccaattcagctccttgtgtcttcctccatccttgcccttgttaaatagtccaaccatgattctctttgtcatctcttcttatagaagcttggttttggaccttgtcattagaaccttcaattcatggggtgcttctagaacttcatgctctttggatagtcctctatcacctcccatgaagggtctttacgactctaacaaaattggttccacttttctttattgatactgtagttctcatgtacaatgtcatcgtccttctccttcccttgtactagagctcatcgctttgctaccatcttaaggattttcttctttgtcctttggtcagacgcttctaaaatatcaaattcagcctgtaatacaaaaaatacatttaatagttagtcaataacattcaacattttacgatttttagaacaaccaattacaataacattcaacatctaattcaaatacctgaatgtcctcccaaattaaatccttctgagctgaaggaacttctttccagttccaccttgtcccaagcgatgatccccaatatgtccttaatttctttttgtgggtatcatcagcttttccagtggcaggatccacattaaccactagcctctccatcctgacgagtttggtagccaatgatctgagccgtgttgcttttctagtcttcttcgacatagacagtgaaggtgctaactcaggaggaagaggggagctcgatggtgtagtcatgtgcctgtttaaaaataacattaattaaagtcaactcaaaagtatagtaagttatgtaattgtaaatgtggaaataaataaatataaaaaaggattacattaaacgatgtcaattaattctcctccatcatgatcattacaatttgcatggacatcgtcaacttcttcttctccgttgaagttaggcattcgtatcgagaaaggagtgagacaagtatcaagagggttgaaccatcatcttcaagattaagaccaatgattttttcatgtagaaccactgaccacctttcatcacaaggattttgaacataaaatacttgtttagcttgttctgccatgatgagaggctcattctgataagctagcttcttaagatctacaaaagtaaatcccaaatcatcagttcgcacaccgatattgctatcaacccacttacacttgaaaacacacacaatgaatttaacataattaagctcccaaatttcatcaatgactccaaagtaaagcatggaagccaaacaaggattgtcgtcatgtacagtagcaaagtgttgggattcagtcctaagactaaccccactgttttgcattttactattgttgtcttgtgatttggtgtagaatgaatacttgttgatatcatatccctgacaacttctaacatttcttttaggcccatctgctaacttccttaacgtttcagaagcattatcgtcaccaaagattgtatctttaaaccaacttaagaaagtcttgttatgctctttcaacaccctattcttggtcatttttgggttactttccttgactaaggtttcgtgatgaactatatatgacaagacttcattactattattgagtatatacaaatgagcttgttgcaattctctagacatggcattataacatgcagtcctcgtgaacccttacctcccactctcatcatgtcaagactcgggaaacccaacaggtttggccttttcaatgtactctgaacaaaattcaataacttcttctgcaatgtacctttcaacagtggatgcttcagaacgatgtagcttctttgtatacccttttaagatcctcatgtatccctcaactgagtacatccaccttaaataaataggaccgcacaatttaatttccctcacctaatgaacaattaagtgaaccatgatgtcgaaaaatgaaggatgaaaatacatctccaactaacacaagataatagcatccttgttttccaagtcatctaactttacagggtcaatgactttgctataaattacattgaagaaatagcactggcgagttatggcatgcctcactttgttaggcaagatgtctcgaatttccaaggctaacaattgttgcatcaagacgtggcaatcatgagactttaagccaactaatttcagatctttcagctgcacaagactctttatatttgaagagtatctatatggcactttaacacggtgaagacactgacaaaaacttgtcttctcatttcttgacaaagtatgacatctggaggcaagtatattttcttaccatcagacccttgatgtaactggtcttgtatacccatcttagctagatcttgatgagtattcaaaccatcctttgtcttgccttgaatgttaagaagcatgtcaatgacactatcaaacacatttttctccacatgcataacattgatacaatgtctaacatctagatcggaccagtatggaagatcaaacaatatcaacctcttcttccatatgcaagttttacttgtcagcttcttttaggtctttccaaatgtagtattgatgtcctcaacccactcaagaacctgctaaccagttaacggtatcgtcacactttcatgctcttgacttccattaaaagcttttttcaatcaccaataagggtgataaggttttagaaaacgatgtcgagtgtatactattttcttccatgtttttgttgtacatagctcgtgtcttcttcacatataaggcatgcatgatggcctttaacactgtatccactcaaattcccgtatgctggaaagttattaatggtacaaaatagcattgcatgcaacttgaatgtctcatttcgatacccatcaaacacgacaaccccctcgtcccacaactttgtcaagtcttcaatcaagggatttagataaacatcgatgtcatttcctggttgtcttaggcccgatatcatcatagtcaacatcatgtatttctgttttgtcacaatgtgggccactacgggacaacgataaaaaagagatagagagagtgttttccaaaaaagaaaactagaggaatggccacctatgtttatttaaggaaaacgtcggacaaaccaaaagataaggaatggtctatgatttgagagtaaaagatttcgggggttgtttacacacaaggaaggtgttaacaccccatgcatccattataaagacgacaacctttaatcgagtgtgttaaaaataaagtgacttttaattatttatcttcccttaagaacatgaattatgtttgttatattttgtttattcagaaaaagaaagaaaatttttattttttttaaaaagagtattttatattctttctagttttttaggtcgacaaagggtttgccctcgctcttacgtatcctcaagtgcaataagaaaatcagacttacgtagttctttaggtagaaaacagcttgtgtgttgggctgattttatttttttgaaagatttgtttcaattgcatgaagaaaagtagttaaggcgttggacctttgaattttaagaaaaagcgaagagaatcgattaaggcatttgaccttgaagtgatctcgagtaatgtgtaacttttgtgcaaaaaaaggagaattgagtgatcatttatttgagtatttttagcatttttagaaataaatttgggtttgggataaactccgtgaagtcaagcaagttggagacgtagcatggagtgtacagaacgtaagcacgtactaaatattactaaatgcataattgcaaaaaaaatgaatgaataattgacatatcaaacaaatcaaatggtaatataaagggataaaatagaagtgggagtacacttagatattaagggtgcaggtttgaaattcaaggaaaataaaatgaataagaagtgggttgtccatgaacttacttggtcgtagggttaacaacatggagtgcaatgccaccttcgggttgagatttcggatttggacaactattcgtccaaatatgtccatgaacttctgaaaaaactcatcgtctgcctgtcatagagtggccaatacagcagaagtgatggaatgtgatcgtctagttacatactacaacctaaagcgtttgaaaagagtgtcgaagctgttaatggaccttggggggagcccccaaaccatatcaatgctactcctttgagggacgttggaaagacacgacacaggatcgcgtggtcgatgatatagaggttttcctgggtgaggaaagcatccagatgttcatctgggtctttggtgtcatcctaccgctctagattgagtgatttccaacttaggggtaagttgacttccattatgtggtcgacaaaaggatgttgacgagtcgtcctccctttcgaacgatggatatgtgataaactggggtcgtcttgagtatttaaggtgtgttgggggtgtgattcctgccgagtgttcatcaccttcgggggatctcactcgagctttcagctgatcatggtcagccttcagctttcggagttcctctcatgacgtcgctccatctccgatataaaaccttttctctcactgttttcattgttcttcattttcttctttattttcatttctgttcttccaatttcatgcactaatttcgtgggtcttccattgatgatgatcatggaaggctaaacaatcaatccaaggatacagtctaagcaaggagaatttgagttctggtttggtagttcaatttttgtgtgaatgttcactttcttcttcaattctctattcagttttcatgattatgaatatgtttaggattgaaaatggattaggttatggattcatttcctaattttgaattttaatcacagatttttttggatgatatatcaattaggtttgtggtttcaattaatttaggagttaatttgattgaactgcttctaatgaaattgaatgaactttcataacaagatcattatttgagaactatgagttaatgatttgatttttccagcagatttttacattttgtatatgtagaatgagtcttccagccatggttccacattgatcctagggagaccattcttaatgacaaccaggaccaaaattgatctgtatgcaggaactctttccatggagtttggtgatgacgttgtccagtttaacatttttgaggccatgagacatcctgtagaggaacattctctctttcttgttgatatcattgatgttgcattagatagtttagatatttctgattttctttctgatgatttttctgattttgatcttggttgtacctgtgatgattttgctgttgtgtgtagtatttgtgcagagatttcctccacacttcactctaattgagttgcaggtacagattctaattcttctatttcccttttatcagctacaaacctttcctttccttccaccattcaacaaccttccttggagctgaagtcactacctgagcacctcaaatatgcatatttagatgatgctcaaaagcttccagtcatcatatctagtagcctgtcacttgagcatgaagagaagttgttgcatgttttgagaggatacaaaaaggccattggatggacacttgctgaccttcctggaataaatccttccatttgcatgcataggatactcttggaggatgattctaggccggtgaggcagccacagaggaggctgaatcccactattcttgatgtggtgaagaaggaagtgatgaagttactagttgctaggatcatctatcacatctcagatagcacttgggtttcacttgtccaagtggtctctaagaagtctgattccgactagagtagccaacagttggtgagtttgcattgtctataggagacttaaccagacgatggtttttcatgttacatgcagattcatattgcaccagaggaccaacacaagaccacattcacctgtccatttggcacatttgcctacacccgaatgccttttggcctatgcaatgcacctagcaccttccaaaggtgcatggtgagtatcttttctgatttattagagaattgtatggaggtgtttatggatgacttcattgtttatgattcctcttttgatgcatgtttggatagtctctctagagttcttgaccgaagtattgggactaaccttgttctaaactttgagaaatgccattttatggtacataaaggtatagtcttatggaatttggtctctagtagaggtcttgaggtcaataaggccaagattgatgtcattacttctttaccttaccccgcatctatgcgggaagtgcattcttttcttggacatgcaagtttttataggagattcatccaggatttcagcaagattgcactgccattgtccaagcttctccaaaaggacgtagactttatgtttaaccggccttgcaatgaggcatttgagggattgaggaagaagcttactacctctcccatcatgcagccaccaaattgggagcttcccttcgagctcatgtgtgatgcctctaattatgcacttggggttgtgttgtcacaaagagtggataaatttagatcttatttgctttgctcccatattactgtctttactgaccatgcaactttgatgtacctgttgaagaagcctaatgctaaacctagattgatcaggtggatgtttcttcttcaagagtttgacattgagattaaggacaggagtggagcagaaaacttggttgctaatcatttgagtaggattgagggacctgttgagtcctttcatactcgtgataatttccctgatgagcatttggtgcatttgcattcatcacatgtcacaccttggtttgctgacattgtgaatttcatttttgcatctgttgtcccacctcaagcatataggtctcaaatagataaacttaagagtgatgctaaatattatgtgttcgatgatcattatttgtggaggtttggcagtgaccaattgatttgcaggtgtgtgccagatcatgagattcagtctattcttcagttttgtcatggcacacctaccggcggtcattttggtcctcagcagaccgctaggagggtattggactgtgggttcttttggcccaccttgtttagagatgctcatcactttaccaccacttgtgagcaatgtcagagtgcaagaggaaccattacacataggcataaggtgcctcagcagcccattattttttgtcagattttttatttgtggggtattgattctatgggtccatttcctgtttctcatggtttttcatatattttgcttgttgttggttatgtttctagatgggttgaagctaaggccaccaaaactaatgattctaaagttgttgtggtttttgtgagatccaacattttttgcaggtttggtgtgcctagagccattatcagtggccatgagagccatttctgtaataggtcattgacatccttgcttcagaagtattgggtcgtgcatagagttgctacaacttatcatccccaaactaatgggcaagcatagatttttaacagagagatcaagcaagtgttacagaaggtggtgcaacccaacaagaaggattggagcaagctacttgaagatgctttatgggctcataggaccgcttaccaaacacctttggggatgtctccctatagggtggtttttggtaagtcatgccaccttccgatggagattgagcatcgtgcttattgggcggtgaagagttgtaacatggcatttgatgaagcgggtatggaaaggaagcttcagttgcaagaacttgaagagatccgcttaaaagcctaggagaactcaaagatttacaaggagaaagtgaagaaatttcatgactatgggattcttagaaggagttccatattggccaaaaagtgctcttgtttaactctcgcctcaagtttatttctggtaaattttgatctagatgatatggaccttttgttattactaatgttttccccatggtgcaattgagattaacaatgaagttattggcaaggtcttcaagctatttcatgagagccctcatgtggaggaggagcttgtggtggacctctttggtcttgccgattttatgtgatgatgcatcttgaatgacatttggggagttgccttttcccttcttttatttgttgtctctttgttagcattttattgcatgcttacattgagaacaatgtgcatttcaagtgtggagtgaaggattacaaaaatctgtttacgtttctgtttatctgtttttgtttgctgtttatgtttctgttattttctgtttctatttttacattctgatttctattttaatttttgagtctgtatgatgttttatctgtctgttttctctttctgtctattttttgctttacgttttgttttctgtttctgtctgtttctattttatgttttttgtttttttctgttttacgttctgttttctgtttttgtatgtttctattttctgttttacatttttgtttgtttaattttgtcttttatatttgggaaaagaagaaaagaaaagaaaagaaagagtttaaaaagcaaaagttaaaaaaaacaacaaaaaagtataaacaaagaaaaataagtacaagcaaagtaaaaaaaatgcaataaagttgttgtggttcatttttatccttgtaaactctttgtttctacctttctttttacttattgttttactccccattgctcctcttttctcttagttttagcttaaatatccttttcttatccaccctttaccaaagccatactttacaagccaataaagtccttttgatcttttgtttctatttttacattctgttttttgttttaatttttgagtcttataatgttttatctgtctattttttgttttaggttttgttttctgtttctatctatttctattttttgttttctattttgcgttttgttttctgtttttgtatttttctattttttgtttctattttttctgttttatgtttttgtttgtttaattctatctgtttttgttgttgtttctattattgttttgcagtaattgttttgttttgttgttattctatttttactttcagaaaataaaattaaataaatagaatttaggcattttttcatgtttttcataggatttctaacttgtataaattgtgagaaatgtacaattttttgttggattgagaggtttcatacttgatatgaatcattgttgtatttgttaaagtgatatgtaggcttgagaaatagaacttaagatggatcatatgtgatagaattatgccttgtgagtttttgggcctttgtggatgaatcacattatttcattcatgttttttcaagtgtgattcatccttgtgttagattactctatgttttgccttatctcttttggcattccttgttgcacatgctttttaggtcttctttcttttatccactagccaaataagtctatccttggattgttatccattgtcacccttttggagcctttatatgtagctcattaaaaactaaaaaattgaaaaccatcttatcctaactttagggagaaaaagggccttggaattgttttgggagtgggttttaaacaagtgtggggtatttttattttgttttgatttgggaagagaagaaaagaatagaaaagaaagagtttaaaaagcaaaagtaaaaaaaaaaaaaaaacaacaaagaaaagtataaaaaaagaaaaaaaagtccaagcaaagtaaaaaaaaaaaatgcaataaagttgttgtggttcattttcttccttgtaaattctttgtttctacccctctttttacttgttggtttactccccattgcccctcttttcttttagttttatcctaaatatccttttcttatccaccctttacttaagccatactttacaagccaataaagtccttttgatcttttgatgcatgtgtatttcaagttgaatgaattagagtattgtcaaaatttggatgtactagttacatgtggtgtttgagtgtaaacatgaagtcatacacattagatgaggttgagtgttgttccttgagagatttctatcaccttggtgcatttttaattttaacttgactactttttcattttgcacttggtgatcatgtgttcatggattgtttgttaccttaatatcattcttccatctttcatctttctcacgtttgtgcattgttaggatccattgaataattcgtgtgccttgttcgtacctttcttatagtttgtggtttactttagtttaattttttctcttagcctttcttttagttttgcctaggagtgcaaaagtttgtgtgggatattttgattgagcatttttagtttcatttttttattcttcttagcttatttgacttctcttggtcttttattttctcactctaacttagtttttgtcttaggcaagcaagtcgacttaattgctaattgttgcttatttttggattttttttgctcacttgacctatcttccttgtgcaggacctatagagctctatagaactccaaatggagcatatgagtagtccctagaaagataaggaaaagatttacaattttgtcaaagataagccaaggccaattctgtcattttaagggtcatgactcatcctttcctactaactcagtcactatactttagtgcaattagttagtggatttttacactacattttagcaaacacaaaatttgtattttcttttagaagttttcaaaattaaaaacttttctctcattattcttcattattcttcattgttcttcattttcttctttactttcatttttgttcttccaatttcgtgggtcttccattgatgatgatcatggaaggctaaataatcaatcattccaaggatccagtccaagcaaggagaatttgagttttggtttggcatttcaatttttgtgtgaatgttcactttcttcttcaatcatttattcagttttcatgattatgaatgtgtttaggattgaaaatggattaggttatgaattcatttcctaattttgaattttaatcacatattatttggataatatttcgattaggtttgtggtttcaattaatttaggaattaattcgattgaactatttctaatgaaattgaatgaactttcataacaagatcattatctgagaaatatgataattcgcattgcttggtttggtgaattggattgatgttctttaatctgttttacaataccttttatgaattctattagtttctgcatgtttcttcaattgtagtttgtgttttcgcaatatttactcttgcatacaaattgtttgacaaaaaccctctattgtttattagtgaattgaagttggaaccaaattgatcgtgtctctaagtcgacctaggttaatcttgtgctacagaattagcgtagtgtaatttttttgaagcaatatgacatcggttatcaactctcggtgtgaattggtggtgtgaagggttagatagaacctggtatttataacgtgagggggagtctctggtccttgtatgtcgaggttgttacagtgatgtaacaacccttacagataattattagcttgtagataatgactaaaagataattgaaggttatagataattaggctaacagataatgtgtaccttataaataatttgtagcttatagataattaggtatttgccactttataaggaggttgcaacattgtcaataacattcaaatgtgggggtgttagagataacctgtttggttcaacagcatggacgtggagggtagacatatgtacgggggtgccacatgagtggccacgtatattgtgcagatcctaaacagtgcgattaatataatcttaaatggtgcagtacaacatccaaccgataacaatattaattaacgcttcaaaacaaaaacaacctcaacaatctcgtgatgatatacatgacttactctaatcttggaataaattctcttataagaatatgttacacatttatttacaaaattacgtatattaattttcattttagtatgaaataaaatatacatgatataaatcgatcaattgtaagaaaataaagagagagataaatattgaagaatattcaagcatcatcaaaatgtcaaatgtattgaatatgaggtgttataaactataagtcaaataaaagtcataatcatgatgaatcctgtagcagatgctagaaaagaggtaaccaaaatacataatcgtatgaactaacagggtcaaatcaaaatacaacaaaatataaactcctaagctagctcactaaacatctaactctaatattaggaggcttcaatatacaggatccttcatagagcttcagatgctaaacattaactattggtgtggacttttggtaaaataaattattttttatttgtagaaattgaatacggtaactttatgacacaaacatatcttattcaatcagttgagctaaattcccttaatatttgatagattaaattaaaaatacttctcttggagtataatatagagtttgtaacatgtacataattggcaacctaagctctactataaggtcggttgggcagtatgtgaatgtcatgttatctttaataaaagtcttaatatgtattattaaactttcattcttcaacctatttttgaatattagcttaaacaacagtattttgattgtcttgtcaagatataataattagaccactataggttgatagatcattatttaacatggattagtggttcagtttacagatattttatatatttttatgattattttgtacctcttaattgagttttgtgagattggacttcatcaggctcaagtgttaagttttattaaattttgcaaatttttcaccttaacattgttttcatgtacaggccataaattttctcacatagatctgatttattatattttgatcttttctggaagctaaggaggagttgagcctaagctaattaaaaagttttaggggtcaaatttaagctacaaagttggggtcctgtacttgaatttttttgtaattaggggccaatagaatttttaataggatttagggactcaagtgagtatgtaaggctattttattacaagagagcctcccaaaaacatcaccacttccacatggtattcctaaataacttaagtattcgtgaaacacttcattaagatattaacatgaataacacaattacaatcaacaacccaagttttgtggtccacacaaagtgcatctcttatgggtgtgaatataaattggtttgaacataaccattttcaaaatgcattaaactaggttggtttcttaatcgaccaagtttgattaaataaaattgaattggttttttaaatggttcggttcaaattaaattggttttaaaactggttcagttcacttaataactaatttttttataataaaaaatcaaaacaattttttaaggaaaaaaactccttgtaaactagttcgagatcagttcgattcttaaaatcaatttaacactggttcaaaaccagttcagtccttaaaccattttttaaaaccattttggttcttaattggttttaaaaatcaattctcaaatttggtttaaaaaattatttgcgtaaaccaatttgaaatcggttcaatttggttttcgcacacccctagtatctctcatgcacacaagattaggagagtgaatctcccatatcatacattgaaaccacacaaaagaattttgcttttcatttctcaaaattcagatacaacacacatgcaagcaaggatcactaagtttattggctaataatgtggctaggctaacaaacaacgttggtttttcttggtattcaaagaatctagagaatatgagaataaaaaaaaagtgaaatctctataactactcaatcaaccaaaagcaaggtatattccaaattttcacattaactcaagccacttatttgctttcacatatgtcccactttttcatttatttcactcttttttttggataaagatgagaaactttttgaatcaattttattttcttccacagtaaccaactttgacattatgattttcttgggacacccttcttcataatacttttaggtgtctgacaagtcaccccaaacttaacgttacaccgtacttctcaacttgctatcttattcctaggtttgggagaaatattgactttcttttgtggtaaagatacatacaccagaaaatgaataattgtttagctcaaaaaaaggtgcaagggatttagttgttcatgacagagctttttggccattggctataattaaaaaacaaggccttgatcacttccaagcaagcatgcatgcaattggattcaaaaaaatcaatccaaatcatatgtgcaagcaacaatatggggtcactcaatctcatcagttcatataattttcctcaccacaattggcctcatcaagaaaacaagggaaatcatgcaacatgtcaaacacattaatcacaatctaaaccaacactaatgaccaggaatgcaaccacaaaacatgcctcaaatcaaaatcaatttaaatccacatctagttcatgcttatctagacaagcaagtaactacacaagccacatcattatttcacatagaataacatttattaatcaagaccaaaaaacaaacaaaagcagtaaaacattagaaagaagttctaaccttgaaaaggttagtcatcctaatccaacccatcctcacccctttggccaagaaaatattggtccccatatttcattggccaatcaacatgggcaaccagctcctctaattaagaagtagtggggggaattcatctaggtagtgttggaaaaggaagtcatacatttgttgctggtaaattttcatctcttggattgtagcaaggataacaacaatgacatcctgcaatggagcagaaaatggttgggacaactcctcggtctcattgtcaatggtaccaagtatgtgtggcaagtcaagtacaaggtaggagcttcatccacaagaatgttgctcgtatcatctgcggggtatctcaaacgttggcagttccaaatggaccactgagtgttagttaaaaggtacccgatatgtgagaacgactcagagaagaaatagtgactctcattagtaacaacaatctttatgcatacaaaacaagtcaaatcaagataaccgaatgatagtacaacaagcaactgagagatgtaatgattataaccaagctcaatcataatagttatcaagcctccaaaagaaattgctctattctccttgtttgcaaaacatgagagtcaacatcaacacatttattatgatctaaatgccacacacaaatgtaggatcaagcatttgttctagaaacaaaagttcacttactttcacccgcccatcatttcctgctcttccaaacacaatgttggccatgaatcgctgcacaattttgattaaaggatgagtgaaatatgaggctttggcttgaccactcaaaaaagatccatcaaaatcatgcactccaagtactatatggatgacagtccttgggagtgagatgccaacaaccatcaacaaggaacccaaaaaatatttattaaaggatataatatatttttagtccctcaactattcatgatttttgtttttagtctcccaactattcacgatttttgtttttagtccctcaattaaagttgacaggtcttggtccctcaactatttttacgtttggtatttggtccctgacattaagttctcccattaaatgatgatgcggcagttgatttataacgttttttctaacaactaaaaatcaccataaattgtttggcaaaattattcaaaattagattaaccatgttttggttgctaagaaccgccaatttttttttacttcaacgtaaaggagaaaagtatcatctaccagatgaatcaacaacaacaacaaaacaatcaaaaaaatttataaatttaatcccaaaaaaaaatttaaaccacttgttgctattgctaaaatctttttctttcacctcttccctaattccttctcattgtcttcctccaaaacagagttgtccgtatccttaacgacatcattcatgcccttaaagaaattgtcctcactcaccttagtaataggtctatgttgtcaagaggagaatctacgataggcttacccgcgcatggagcagaggctcatccttgtgtttctaaggtgttatgatagtcagaggcacacatggaatagaggcaaaaagtgtgcatctcgattggggcatgcgggtgcatagaatagtcataagcagccattagatggcacgtggcaaccgtcagctatcacgtcattactgaaagttagaatgcacgttccatgacgttcatggaacatgttcatgagggtgaaaaacaaaattttctattttgttcttcgtggtggaacccgtaactccttacgatcctcatgaaacttgtttagaataggaattttagaaataccttgttgatcgtttgaaaggcttcaaaaggatggtgatccacacggttgtaccttggatgcttgagagaactccttctctttcttgatcctcattcacttggttgcttgctaggcaatgacaaggtgaaggcttcaagtgtttggtttatttctcaaggaaaaaaatggtgtcttgatgttagatgaaggtgcaacaatggaggagagaatatgattaaggataaagaaaacaagaacttttttgttcttcaaagaggagatcaaggaagctatttgaatgtgagagctctaaaagtccagggccagatgggtataactttagattcatcaaggaattttggagggtattgaaaagagatgtggtaagttttcttaatgacttccatgattttggtactttcctagaggtcttaatgcatcttcaatcacccttattcccaaatccttggaaccacaagggtggagcgattatagacccacttccttggtgtggcaaaaatcttggctaggagactgcaaaaggtacttcatggggttactgatgaaagacaaagttcttttttgggggggaagaagcctattgcatagtgctatgataacaaatgaggttgtggatgaagtggaaagaaagaagagaaactgcttgatttttaggggttagcaatatttccttgtttaacatggccttaaattgaaaatggaaatggaacctattccaaaataaggggtccttgtgggaaagggttttagactctaaatataaggggtggtgtgatttaggggagggtatggtgaggccaaatagaatccatatggtggagggatttgaaacttgtgtgtggaggtgaaaatgaggtttggtttaataatatggtacaatggagattagggaatggtatgcttacttactagattttggaaggatgcttagttgagtgaaggaagcattaaaaatacctttcctaggggatttttgaatttggagcaaaaaagagatgttgtagggaatatgggaaggtgggatcaagggtgttgggcttgggaattttgatggaggagacagtggtttgagtgggaaaaggagttagtagaggggttttatagcgtcttggacagggttactttgagataccaagaagatgacacttggatttgggtggagaatgcttcaaatgtgtttacagccaagtccacatatttttccctttacaaaatgcattttgagtcattggaggaggatatttttaactgtctttggcacttaaaaattccccctaaggtagctttttttccatttggcggttattccttaatagattgcctactaaggccaaccttagtagaagaaatgtaaacttggagaatggtaatttatcatgtgtattgtgccatgaggtcaaggaagatgcaaatcgtttcttttttttttcttgtggctttactcatgatatgtggaaaaagtgttatagtctttttggaatttcctctgcatcaccaaatcatgcgagacaacactttttacaaaatggccatggtttatcaggaagtaattctaacctttagaggcttctaggatggagtgtcatagtgtggaacatttggaacttatgaaatggaattgtttttgatgaaattcaacctaatggtgaccgcaagtacccgcaagtgtggaactaggatgaagtgtcatagtgtgctcttatttactatattggttgatgtctaatttgagcatcgaagtgtcttcgcaagtaccagcaccccctcggctggtgacaaaaggtgatggaaacaaacagatacaacttgacatagcaagggataattacctcagtaccccccagactggtacattttggcacccatcacggggccgagttgaaatttcctacgacccataggtaatggtagcgacaaggagcaaaacgaacatggaaggaaactttattacagaagcacaaaacccctacaatgcacactctacgcacgttgatggcgtgactggccactcaaacgtgattcaagatttgtgtgtcaagatgaaaccctggcagaaacatcatgtggaggaaattgagacattttggtggcagcatgcactactccaaaaccaacaacaagacccaacatggaggacgtcccatcagacataagaaaactaaggtaactcagacgctcataacattactcgcatacctacttctagtagggtatatcatgagaatagttggcaagaggagacaccatgcaccttggttgcttgtacctccacgataacaaccctaacaacaggaacttgaaggcgcccttttgtcgaaggcatcatggacgctcccatcccctcttggaagggtgatagaggactatctaaggatcgtgatgatgaaggtccattccaagccaaaagtctagaagaagagcttgaagcacttcttttggtgagctttgaatgacccatgacaagagctagaacccaagccattcaagatcacatcaaaagtcttgtctgttgtgataagcaagtgctgtctgttttaatcgattacaacgtttctgtaatcgattacacaagcaagtgttgtctattgtaatcgattacaatgtttctgtaatcgattacacagtgctggaacgctctgttttaaatgattatggatcgtattaatcgattactttcggctaaaatcgtagtgcttctatatatttttgttatttttgtaatggactttgatatttccgcaaataggcttaaacttacgtttttaggtgttttattagaggcctagccatataaatactcagactttgctatttttggttaactttgattaatagaaattaggcatttgcttgaattgagagtttagtctcttgttggttcttgattgaaaccaaattgattcttatcaaggaagctttcctttgtggcgaatcctccttcaacttatcgttttgtttgtggatcgtggcgtcattcctaatcattccttaatcttctccatttttctatttgagtttaaaccacaattcatggagtcttgaagcttgcaattcggaaacggtccaaaccaagcattcatgccttggtaggcatcatgtggtaatcagagcttgatgttggatagcatatcgtaaagatttctatctatgttatttgcattttcattttttatttttttttcgaaaaatgaatattgagaaaatcatgattcttgcttgtttgttgttctttgtgtgtttcttgtgtgatttttaagtttatcttgcaattgccttcatttcccctatcattgtgttgaattctgagttatttgaatatgggttgttcttcgtgttcttcataaaactcatagcatttctagaaattttctgagtttgattcataaaatttctgtctagagagttttggggcgtttatgcaaatatcaaaagtttctggtcctaaaagagaaaatatgaaggaccaaaagacaattattaaaaactatattggggtcaaaatgaaaatatcaaaaatatgaggcgagtaaaaaaattgacagccaaaattttaaaattaaaaactatattgtgcttatgattgctttatagcactatttttttgcataattacaatggtttatatttagtcaatatttttttttatcttcataattgtcttctttgacttttcttttgagttatgtttttcttgttgagcttttattgcttgtcttccaaatttccaaggttttttcttggagtttttctttcttccttgatctcttaagttgagtttggatttgtttcatctttcactttggatatttttttatttgaaatctttggttgaattttaagagttgaagaagagataaagagtggaaaaagacaagagtgaaccttatagaaaaagtcttacaagtgtgaaacacgagtgttgaagagtgtaaacacttagtgagtagtaaggtccattattgttttgttttactacctttttcttgtagcaatgcgatggtgtccgatagcgatagtgatccgccttcacctagaaccgctaagctaatgacttcattggctaagcaaatggataggttgcaaagaaatgttgaaagaaggatgggagaacgttttgatgagatacaacgaattactcaggagttgagtggaagaatggaggacattgagagacatcataggtcacctcattcttctcaagggagtgatgatggctatgacgatgttggaaggcataggcataggaggaatatggatggaatggaagatgtgaaattcaaacttttcaagttcctaggtactaatgacctgaaggcttactgataaactcgttatcgacacgcaccaaaacaattttaccaagctaattctatagcacagagctaacctaggtcgactcagagacacgatcaatatggttctagcttcaaatcattggtaataataaggggggattttgtcaaacagttggtctgcgtaaagtaaaacatgcaagaacacaaactaaaattaaagaacaatgcaaaaattaacaagattatcaaggagtaaagtaaaacagattagaaagcatcaatccaattcactaacccaagctaattgaatcatcatcattcccataaattgattctaacatgaacattcattcaatctcaatagaagcagttcaatcgattctactcctaaattaattgaaaccacaaccctaattgaaatatcattcaattaatcttgtgattatcatttgaattaagacatgaatccataatcctaattcactttcaatcctaaatgcatccataatcatgaaaacataatagaaattgaagaagaaggtgaatattcaagtagaatttgaaataccgaaccgaaacttcaattcttctcttgcttgtgttagatccttggattgattaatgatttagccttccatgatgatcaccaaggaaagccccatgaaatgagtgcagaaaagtggaagaatagcaaaatggaaatgaagaagatgaagaacaatgaagaacacttgagagaaaatgaagaacaagcttttgatcctaaaaactaaagaaaagaaatgtaaaacttgtttattgaattgtaaagtgtgcttccaagtttcactaagtcactaatacatatagtgactaagttctgaaaataaaatgggccacaaacaagcccaacaatctaattatttgctatttacaaccatgaaagtcaaattcgcaacccaaaattacaagtgcgaaagcgctaacttcaaagcttaaaatgaccctctaaatgatagaattggcctcggactatttctagcaaacttgtagatctttttcgttatctttccagggactcctagaacgcttcattcggagatcggtagtatcctataggtcctgcacaagtcagatacgtcaagtgagccaaaaatccaaaaatacgtaacaattagcaattaagtccacttacttgcctaagccaaaaactaaattagaataggaaaataaaggtccaagagaggtcaaataagctaagaagggtagaaaaatactcaactaaaagcactctatcacttaccttgattgggagatcaaagtcaaccaagtctttgattgtcacaattttagtgaagaaaagaaaatgaagttggctagcttagaatttgaagggtatgtcatggcttggtggactcaagtgcaaatggaaagaggaagattgagaagatatcgaccagacacatggtttataattaaaggaatcatgagggagagatttgtcccacctcaatacattagggatttacataacaaattacaaaggctcaatcaaggaagtagatgtgttgatgattattacaaggagatggggatttctttggtaagagcaaacattgaggagacaaatgaggctacaatggctagatttttgaatggcttgaatagggatattcaagatgttgtagaacttcaaacctacaacaccatggatgaactcatatatagggctatgaaagtggagcaacaattgaagagaaaacaagcctacaagaagtcttcatatggtcattcatcttggaaggataaggacacttccaagaaggagggttcttcttcccaccatattgaacgaaagtcttcaagaggtaattctacttcacctccttatttcccttccaataaatctaattcaattaaatgctttaagtgtttgggtaagggtcatattgcatcacaatgccctaacaaaaggaccacgattgtgttggaaaatgcagaggtggatagtgagtcatctaggagttctcacagttcctctagtgaagtctaggatgattgttttcttcaaccggaagaagaagatcttttaatggtaagatgcctcatgggaagtttgtgcaaagatggagatgatacacaaattctagatgcttggtgattggaaaggtttgttctcttatcattgatggaggaagttgcacaaatgttgcaagcactagattggtagaaatgcttggtttaagaactacttctcaccctaaaccttataaattgcaatggttgagtgacaatggtgagttggtggtggataagcaactgttgcttacattttccattggcaaatatgtggatgatgtgctttgtgatatggttcctatgcaagctagtcatgtgttgtttggtagaccttggcaatgtgatagagatatggtacacaatggggtcactattcgatactctttccttcataaaggtaaaaaggtagtcctctcacctttgtctccaagtgaggtgtgtgaggatcaaataaaaatgctattgaaaaaagaaaaagaaaagaacattaaagaagaaaagagtcatttgagaaagaaaagccaaaaagaaaagatggcaaaaagattgataagagagaacccaagaaaatacaaaaaaaatgaaaaacaattagtggtaaaaccgggtttgttcatcaaacctatggtggtaaaaagagtgatgctagctagacaacaaatttatttactcattccaaattatttgtgcttgtcttctagttcctttgacttgcctccatgttttgatacactgttaaaggagtttgaggatgtctttctacaagacataccccatagcttgcctcctttacgaggaattgagaatcaaattgatcttgttcagggagctttacttcctaatagcgctacctatttgagtaatccagaagagaccaaggagattcaaaagtcggttgaagagttgatgcaagaaggatgggtgaagaaaagcttgagcacatgtgcaatgccggtcatcctagtcctaaagaaaaaaaacttgtggaggatgtgcacggattgtaaacccatcaacaatatcaccataaggtatcgacatcctaatcctagacttgatgatggggtaatccattctaccatttatttttctccttgtgaggtcttttatgatgttagccaattatttcctattgatttaatttccttacctaatgattcttttattttgagtaaaaatgggctttctagagtcacttttcttagaaatctccatggaagggtgccaaatcatattgcgaagatgatggagcaatttgctcaacatgccaacaagggaagaatgaccatggtatttgatccctgagtttgcatttgggtgtatctaaggaaggataggtttcctttccaaaggaaatctaaactccaacctaggggtgatgaacctttcaagatacttgagaggattaatgacaatgcctacaagattgacttgccaagtgagtatggagtgagttctagttttaatgtcgctgatctttcttcttgtgatgtaagtgttttgaatgcaaatccgtggacagattcttttcaagaaggaggggatgatagaggactatctaaggatcatgatgatggaggtccattccaagccaaaggtctagaaggagagcttgaagcacttcctttggtgagctttgaaggacccatgacaagagctagaacccaagccattcaagatcacatcaaaagtcttgtctgttgtaataaacaagtgctatctgttttaatcatttacaacatttttgtaatcgattacacaagcaagtgttgtctgttgtaatcgattacaacgtttctataatcgattacacaagtaaatcctgtctgttttaatcgattacaacgtttctgtaatcgattacacagtgctggaacgttctgttttaatcgattacgggtcgtattaatctattactttcggctaaaatcgtagtgcttctatatatttttgttatttttgtaatggactttgatatttctgcaaataggcctaaacttacatttttaggtgttttattagaggtctaaccatataaatactcagactttgatatttttggttaactttgattaatagaaattaagcatttgtttgaattgagagcttaatctcttgttggttcttgattgaaatcaaattgattcttatcaaggaagctttcctttgtggcaaatcctcctccgacttatcgttccgtttgtgatcgtggcatcattcctaatcattccttaatctcatccatttttctatgagtttaaaccacaattcatggagtcttgaagcttgcaatccggaaatgatccaagccaagcattcttgtcttggttgtcatcaaagggtctatctattgacaaatatgatgacaccactgtaacaccccatatttctccatgtctgtgtattttcttataaatacgcatttctagataaatgacataaatgcccttggatattcttgaaaatgcccaaaatgtccttggataatttcacaaatgacatttaggtccctagggtaaaagaccaaaatgccctaaacaattgtccaaatgatcaacatacccttatagctctggttaggtcagatagacttagtaatgtcctagaaacctgataccaacgtagaatggtcttaaacaaagaactattgatatttttagtaaagaaaaaccctgaaatagaatttttaagaattttgaaagatcactcataaaagattaaaaataagtcaatctaagttccataaggacacagagaaaggaaagacataatctaggaattttcctcttaattatgaaatgaatgaagtactaaataaatagtctatatattttactaaattaaaaaacaaaatgaaccaatagaaatttagaaaaagttattagaaggaaattaggagatgataatggtttaagaaaatttttattgaagaaaatttcctcttaacttctttggacacggaggaagttacagttattatttcaaaaatcccaacggccaaaaattagatatataagttaggattataccattaaaattttaagaagatccaatggttaataagttcagaatgaaaatttttataacacgggtttttggcagaatttttaggactaaaactaaactattccacggtttttactccaaaaaatcctagaatgaccatcctagaataatcaaggtttaagacacttgtaaggttaaaaactaaaaaaagcatgtcattagaccatttggaaagctaggtaattatgaaacttgaaaatgatgcaacaaaatctactatagataagcctacatgtcaaatgaataaaaagcaaaggaaatacacctccttattgaagctacatgtgcagccctaggtggcaaaggaaaagtgtagaaatctcatgaaataagacacttgtgtggaggagaaacactagccaataaaaagaaaccaaatcaaaagcaaggtaatcataagcatgagatttttctaagaaaagttactttatctagcctataaataggagtggtggggaccaaatggatgctagttcacggttttgcatctcattttcagcccacatccctttcactcatttcttttcctaaacacaaaaacaaaccaaggaagccacaccttgaagttcacgtggaaaggctagaaaatcttgaagaaggtagtttgatttcaaataaggaaaagccaaggtatgggaagtattatggtatacatgcttagataattaattatgttatgtcatcctttaattctataaaattttagctaggttgtcatttatttccatacaccttaaagctttgcacacttagtgtttgtaaaaatgcctcaaagaagtaaaagaatacctaagtgataagtaatcttaaataacttaagaaataaataacttaaatataggctagtaggaaagtgactagtaaactcaaatctctacatttatgtgttaaagttatgtgttgcttgttatattgttatatgttacttatttgataataacatgttgcttgttaggttgttgttgtatgttactcacttgaaaatgaatctttctttgtacaaagattgtttaatgattatttgatgtgattattgttatatactatttattataaggtgcactttaatttgtattaaagctatatgtaataaaatttaagatgttaaaagtggtggaatacgtatactaaaggaaattatggtgcacttacacttctatatatggacttgatcatgatgggagaataaaaccttttgtgccaaagttataagaatctgataaataaaggagtaactgaaaaataaaatgaattcatgcatcatttgcacttgttccctcagagtagaggaggtttcactagagtgggtgaaactattttatggtaccctgttatccctcagagtggagggaggttccactagagtgagtggaactatttgattatacccctcagagtggagggaggtttcactagagtgggtaaaactattataattctggtacctctttataggattctgagatctcagtcatgcatcatgataataaaagaaaacatgcatcattcatcacatatctgttttacaattgttattttgtttcacttatttatctgttcctgttaattatctaatcatgtttatcatgtacttacccgagttgtgtctgtggttgacacttgtgatgactccaattactttgggcgagcagaagaacagtgagctaaggaaattattaaggaaggagcttaatgttctatgtgctgctctgctggatgttctatataatgtgttcgtgactttttgtttgtctgtatttatgctactatgagctgtatgtatcctatgttgtaacaaactatttgagattatattgtacttggactgtatcttaatttatgtttgaaccttgtagcttaataaattttgcaaactcattagaaaaataatcgattacatataattaatgttaattaaacaaaattacgtaaaaaaaaatttctgtaaattaaaaagcgtaatcagttacatacgtataaattaattaaaagcgaacatgatacgtagtcgttgtaataaataacatagtcgttataaccacaaacctggatgagaacttatatgtctatgttactaatgttatatctacacaagtgacaaacacgtattatgccatgtcttcccaacctcgttgaagggccctgcattgagttggttcacaaagcttcctttttattccatcgatttgttcgacaccttggcatcccgatttagcactcagtttgatactagttgtccccatcatttgacttcagtggcgctagtcaatatccgacaagataaggagacccataattcgttcatggaaagattcagcaaagtgatcctcaatattagaggattcaattctgttgtagccctacatcacctgatcacaattagtgaatagtctatgtaagaagtcggcctcagatatggatgagttgtgctaaaaagcgactaagtatttgcaaatgaaagagttggtcgagttccgacatcatatgcgggtggaacaggttgatgagaataaggataccaaaaaagaagggaagaaaaggagttgcgagtcattcaaagaaagggcccctgcaaccaagatactcccaatacatagccttaaacaccaatcgtgaaaaagttgttgaagaagaacttagcttgaaaatcatgggagcactgtgaaaggcactcacacctatattggctcagaggcaaaaacattgttgttttcactagaatttcggtcaaggaatgcacaatgttaaaggataaaatcaaagacttgatatgggatgggcacttgaaggattttctccagcccccattttataagatagcaactccctcatgatgatcttctccatctctagatctcccaccaacttattgatgacctcatacaatccccttataacctcaccatcaaattccatttgaaggttgtcatagaagaactctggattcaaaaagtgactggttgcatgtaatggagaatgaagctaaacattccatcttttatcaatgatttgaaacaaatccctatatttgtttgtatctttaaaatacctaataatagtttcctttgctttgtccattgcttcatatatgtaatccatagctggatttttctcactatcaacaagtcgaagcagtttcattaaaggagccattactttgagaatgtaaactacattcttccaaaaacttaacatcaatacagttttagtggcttcctttccatttgtctcctttgacaacttgttttcattccaatcattcaatacaaacatggttctaatattttctcttggtgaatcctttccaaggaaagataagaagttccatatcgagtgattgcatgcctcattaactctcttttgtttgtaaagaatctcaacatactcaaagtgcttgtatggctataaatgaagccaacaagaaagatagctcgctgaattgtcttctttatatggggaagcttcccaatatcctccaatatcaagccaatacaatgtgcgacaaatgtttgggccttttttcctccaactttctactagcataaacatagttactcccattgcttgttacaacttgggcaactttttcttctccaatctcctccacaatagaatcaagcaactcaaatagcttgtcaacagtctccacaaaattagaagcatcaatggacttcatcaacattatcccgaaagaggagttcactagaagttaattatgcttctttgcttcctatttgtccaagcatctgacattatggaacacccaaaattttcccattgttccacttgacccttcatcaaatcattagtgtactccacctcattttgaaggagtattactctaatgtcatgatagcttggaggtcgcaaatgctttccaaaatgcgtaacttcatgaagcatgtcttgaaagctttgcaacttgatcatgttgaaggatagcccagcttggtaccaaaatcgtgttatagattggtataccctttcgatggcctttttatcacaaagctcccttatgtagctcccttatgtttgcttgtagcaacttatcccaattctttgaagctgtagattggagttgagtatagagatccatgggcccctttctaatatccttcttcttggacttccccttagcatcaatagaaggttgaccaacagccccaacttctaactctataaactcttcctccaaagcttattcatcttgcatcgcaaattggtagaatgcttcacttcgtttctttttcttactattttcagatgcccttatctcatctacaacttctttcaaacatactaagcaagctgcaacattccccggctttccaatcaaatgatgttcccacttgtaattcctcctttcatgatcttgtggcaatagttacaacatatttcatttatgttattttttctaacagtcgcgcaacgtttccatacaatgtctatcctcttactagtagtgtttgaggaagcagtgcatgtccatgtccctgacattatcctataattgaaaaacaattgggataaagttttagaagaaaaagtcatgacaagaaacaaatattaattctgaaaaaacagaattaaaactctcaaattaaaaatccagaacaaaggaagttcataacagggtaaaaaaggagacaaaaacaatttaggaaaaaaagaaagaagaaaaacgaaagggaaaaaaaaacaacacaaagggtcattggagcatagggttgtcggccagaaagggtcgccgaagcaaaggggttgtcgtatgggttcccaaagatttgagctagggtttgcgtgagaaaagatcgagtaagcttgagaagaaggggggggggggggggggggggctcattgaggttaactgtgtttttcaggtcaagttgttttgaccaacctaagtccaaaattttttaaaaaattgtaacctgctacatccaccatgaccgtcgtgaactgccacgacgttatggctatggtagacgtcatatcccaaatggataacgtcaatatctaggccgaaataacaccaaacagatggcggagaccgccattataccgctatttcctaaaatgtagcactattataaaatggtggtgacggtgacaatgataatgacggtcgtagcgatgaatcataaaatgtagcactattaacaattgcttcagattgttacatttttcgctattttcctattatgcttactatcagaagataacttcttactgtcaaaagataagttgataatatttgatagaagagcatatgctcttatttaaatagaatacaaaataatctcaaaaaggaaactactgattaattctcatcttgtacccactatcaatccctgtaattatctgtcaatgattcctattcataaatacaaaatattcaggtaatcaaatctaattatgggattcctattcataaatacaaaatattcaggtaatcaaatctcctaattatgggattttcaacctatctataaaaggaaataatatattcagaatcctgtcaataaaagggaataatatatatgaagggattctgacacttacaactctctttatttaatatataaaaaataaataaagcgattttacatatgacaaagtaaaagttgaaaccaaaaaaactttcagcagacatcataaaatttcccggtaacataagttacagataccagaactctaattctttaaataccagtgtgttaaatgacctggaatgccttgctttagaaattgtattatgaccaactaccacatgttttaaagttaaattaaagtatggtacatctattaatcccaagagattcaaaaagtcttctgccagaaggccaaaagtgtgagaaccaacccgttcgttgtgcctcaggtggagcttcatgtgagtcctctgaatttgttccatcagagtccccatgtacttcatggtccttctggctttcacttgtgatctgatctccatctacatcaggtttagcttccgaaatctctcccggcttcttgtcaaatagccctttaaattgattcctagctttcttctcaacatcctgcaaatgaattgatataaaaataagaataaagtcttagtgtttccttcggtgatgtcttgagcatataaccaaataactgatttcaaaccgactgctccttctgcttcagtttttgaagagctgcagttgcatctgattcagttgacttgtcgactttcatcatctaagatagcattgaagtgattttagaaatggataacaatacagctttagatgctaagaaagttatgcatgaagatttttaccattttgaaatcagcccttgcttcttcaaaatctccagcagccatgtaggccattccacgacgataaagacccttgacatgtgcaggatttgcttccaaaacctgcatgatttgttgaagaaaacacgacaaagggcaaaatcaacatatagaacacaaaatcaaatgccagaaaccagatttaagacaagaaaaggaaaagagccaatggttgaaaatcagattcaaatatttatttattgtatatctgatttagaggaaccaaatctcctccaattatgtttattgtgagaggctcgttgttcgatgcctcacccctcaacttaccaatgaccttccagaaactgtgccttggttgcctattttgcccttttcttatcatggcttcccagaacctcgggacaactactttagttgcacaaattggtaattcatttgcttgaatattatttccatgtccttccttatacttttccctttctacatctggttatttacctagtattacttccaccaatagttcccaaactcagtcccatgggattggcccaacgatgcataaaggacagagtctacggtcaagtaaaggagggaaggggtgatctaaaaacccttaggactgggattgagaaacaatggtggaagtaatactcggtaaataaccaaatgtagaaagggaaaagaaaagggatttctaaccagagatgtgaacagatgcgccaagtcaagaacccatgggccaacggaaggagaaagatatgcaagcaaatgaattactgggtgtgtgcaaccgaaggaaaagcgttatggttcaaggaagccattatcagaaaaatagcaaaagaaaaaacaaacaaggcagtcgtcaaaaggtcgggcaacaggtggcgggcagcaggcctctcagtttctagataccatgttaaaagagagaaaggggaggcatagagctgctgaatcactgtctttgaatgacaacatggaaggttggctttaagattgaccatgaagggacctagtctcggatgatgcaaaagttgatctgcggacaccattgccatacatccaacagaattgatttgtgcaaaaacgacaacaaggtctgctcttgtacaaagagaagagaatagaatttgattgtaggtggaaaacgtgtatgtgcacatgaaaccaactagaccagtactccagtatggtagtgagaactgagaaatacaaagcacaggtttccatctagcttattagagttgaagaaattaaacagcagatttctgacacaactgtatttttcatgttatttaccttctcccttttttcctccttttctacccatttagcattgcttgttttctgaagaaaatcaaatccttatacaaggaattttactccaaaagaagttagcctatgttgattttagcaacttgctgacatgaaaacatttactccatttaaattttagcccttacgaaacattaattttagaaaagtagaaagccatggtgattgacccattaattacaaatgaggctcacttggacaggattcagcttagtaactcaggcagactaacaacaaattaatgcatcataccacctcaacctcatcctaaaaatgacacagttagaactttgctacataacgttcattacaaacaaaatccatgactttgttttaccatcaaaatgtctacttccaactccaaagtaacaaaatcaactattgctattctgtttattccaaggaaatataattatagatacatgatagttgagatcagcaagcataccttaatgcaagtctcaatggactttttgcattctcccaattttagatggcatgcagcaacattcaggtgtagcaaattcttcaataatgagagtgaaagagagagagagaaagatttagtctaaatttaaatcaacctaacaagcttaagttaggtaaatatgtttcttttctttaatatactgggaaagagacaaaagttcactcacacgtgtgtcagcaaaaacttttccttcttcgtcatcttgtggattaacatgattaaattctcgaagcacctattatcaactaccaataatgttagcaagttcaatgtaatagttagacattcagagccacaataaaaaatccaattaccataaaatataccatagatatccaatagatgatacaaaatccaatccttttaacaaagtcagagactccaacagaaacaaaataaacagaatttaatagtactcaaatcgtaggactgcaaattcattggcaagtatgaacatagatagcagaagcaaaacacccaaataaaagagaactattttgtagttagctgatatcatttttctcaatcacaactattggtcttgacctgaggaccttgggaagggagtagcaaggatttaaattctgggcatcaactctcccagcctaacaagaccaaggtgagtgccattacaccattatctagatggaccaattcaaggataattgttggagatcccacatcgactagtgatatgacccagttaaagtacataagtgggggacaatcctcaccttacaagccgatttttaagggttgagttaaccccaaacccaattctatgaattataatgtttagatacatagtttctaccaggatgtactacagcacagcacatacagctactccatcaaaaacttctgaccagtgagtaaattttctacgagaaaaatgttaatttctgaagagcacaaaattcaacttagcacatacgagaaagatgaataccttttcatacttcgccttgccaagttcatattttccttctttgaacagcctgttaccctgagagaataacagcatgaaacattcaagttcctttaatttttattcaaaaccaaaagtatacccatcatgatgtttaataccttcataagtgtaaattacagcacaagtatgaaaacaaaataatgagcattaaccaaataaaccacagtgaagccagaattataaatctatataagagagcaagatttgaaagaaaattgaggacattcaaggaaataatcatatactatctatatttcagaaataacaatcttaacataacaagaaaaattgagacttacagtgatctttctttgtattatggttcactttttttcatgattatttcagtataaatgaaaatgatttcttcatgttatgcatgcatagcaaagagagtagtaatcatggatccataaccattaaaaacagccttcctagcttaaaggtttccccatttattcttttttttaaaattttctgcttaacactgtttcaaactcatgtttaacagaagtgcccaacgtaggatgatatattgtcaaaaaaaatacaaactaaattacaacaatgacaacaaaaatataaaataaatcaataaaacctaatacataagaaaatatgccattgccacctagttctcaaatagctccaaataaattcagtgtaactgtagttgacttagctatatctatttttctggtatttaactgagtaactcctatcttgcaagcatagctgagactagaccttggggccaatagtggtggttaagtaaaaccctccccagggacattactggtaacgtttgctagggatcacagtttatttccactgtgacaaaccactattggataacttagctgtctgttaaaataatattatatctttatttttttattaaaaaaagaaaaagaaaaagaaaaaaagaaaaccccccatttaactattcaaaaataatcactaaaaaaaggagcaaagcaataagataactgcttcattgcttaatcagaaaatacgtgctttaaacaactgaacactgtttcaacaggagtaggatattcgtttcatgccccatactgcaacaaccactattgggtaacttaaatcttaaatatttattatttggaaaaaaaaaaaaaaactccacttaactccaaaataatcacctaaagaaaggggttaagaaatatgaaaattccatcattgcttgatcagaaaatacatttaaaacaactgaaagcttaatttcaacaagagtaacatattggttccttgccccagactgtgctcaaaacaaacataaagcatgtgcagaaacatgttccgcatttgtgtcaagtaccaatgggacaccagtaatagcaagccgaggaccagatatagaaaattgagcaggttcaattgcataccgtgtttctgatgttttcagcctcattcattatgcttttaaagtccaatccagtccagtcctgcaacaaggagtaaagtacataatgcattaggcatagttataaggatatggtacaatacatgtaaaatagttatatatttgaagtattaaacccagcatgtatggtttatcttatgttgtttcatataattatcatagttcagccagggacaaaaatcataaacaataaactagaaatctgtctcaatcaagaatatttaaggaatgctaattgctaattgaaccgtaacaaaagcaaaacaaaaacaatttagagaatatatacataacttcatcagcattgtcatctctgacacacttatttttgctattgcaacacttcaccaatacacattcactaccatgtagcatcacagatctataattgctaaatgcatatttgcaactactataaaaataacatgaatttaattaaacaattcattaaagtacctttggcgtttcaaaacctagaagctcaatttcccactgaatatgagcaccctcagggacatttaatggcctagtcataaaaggaggaagtatggcaatgaaacataggaatagaacagaatgacaatggatcttcagatagaaaccatattcaattggcaattgcctgcactaaaatgcttcaaaaaacctaaattattggttaaacacacagtaaaaggtgtactttcgtcagcaaccttggaaacttatcataaagagctatctctccaggaagcatcaaacgaacactcatttcaaatccctcggctacctaaaacagaaagaaaatgagattccagaacaataaccaatgcaaatgttgatgaatttggattaatagcattgatgacaaagtgcatacattacagataaacaattacacaccaggaatttccaaactataaaatctataacaaaagaaaaagaaactatttaactcaagtttatttaggcaaaagctggaaactcacaagcccttctccagaacagaactccaatggctgaccatcattgtctacccttgtatcataaaatactctcttttcttcattgagaacagtacccgtgtaatgaacgcagcagactgtcatgaaggggacaatccattggaaaatcacctgttagatacaaacaaaaaaacaatatcataactagactttgaatagaaataaacaactagcacttaaacgtgagtgcaactataaaattattttaaaaaaaaaattctcctaacatggcaccttaacaaaagagcaatcataaaaattttgaaaaacaaaatatggtaacttggtaactcctgaacttttataattaaaaaatctttaatataaactaaagcatattctccacaatattattttccatatcttttcaattttatctttttccttggctaaagagaagatgaagccttgtacaatctaggcactcctcataaaattgataccagtaaataactctagagtctcaatccacacctttcccatcatgaattcggcgttttattaggcgcccatctccaagcatgtctctcacctgttgatatataactaagatgaaatttcatatgctcaacatcttggtcagagaaaaattacacaagcatatgtttcagacaccactagtaataatacgaaggataaaatccaggtctctcaatacacttatgaagatcagcaattacaatgcatacaaatttatgtacatcatgaaccacaacagaatcttcatgtataaaatgttgggcgtaacattaatgtagtaacaagcagaatattcataatgctagcaaagtttcataaaaagggaagtatatgacaaatacttcttaactcagggataagtaaaacaaatattggaaagaaaatagaaaagcaaggctgtaagagctaatcaacaagcctgacctctaggcactgaaaaacataatgaggtacccctatatgactgtcaagcatgaaaacataattacaagccccaatactaaaatactttaatgcttaacatatacaaccatgcaatatgttagaatactatagtatatataatagaataagtcccacatcatgtatattgcatcatggtttttgtacagtttaatataaatcactccatgtgtgttcatataagacacacaattctccaatctcaagttggtaccagagctctttatttgggccttcgcttccgcaaaaccctaagcccactgcttaggtgttactccttccttgccgtgcgtccttccggcaagccctcgtccgtcgtgcgtccttccggcgagcactcatccgtcgtgcgtccttccggcgagtccttgactgccatgtgtcctttccggcttgttcccgatcgtctcccaccgtccagaaccaccgtctcagccatcggaattctttttccggcgagtcttcatccgaaaaccacccaagaaagatcgtctccgtccggcgaccatctctgtccaagtcgcgtcgtcgtccgctgccacacacgcccacacgcgcctccagtctacctacgcgtggggttcacgcgccacctttgaccggcgcgtgggaccacctccggccgccgttcaccaccaatcaagtgcagaatgattcgcctcttcctcttatgtccagatccgagcttggttcgtggtgggttttcgtttttgctactgttcaccctcgatttgcgtgattcttttcccgatttgtgataccatgggtgattcctctactgtggtacccagaggctctgttggtggtctgtctgcccctgctccatttatcacgacctccaagttgactggttctgagaactacacctcatggtcaacctccattgtcatttggtttaccggtcatggacatgaggatcatctcaccacagatttggggtctgttcctgctgctcagcaggcccaatggaagaagattgatgctcaacttctcacttatttgtggcagtctattgatctctcactcagttgcatttttacggcctataggacttgttatgaggtatggacagaggccaagagcctgtacacaaatgacattcagcatctttttgatattgtctctcagattattgatcttcgcacatcttccttccctcatatggagatgcgcgttggtagaattaagtctttgttgcaggacttcctcactatgcttccttatcctaaagaccatgctgaatatagatcccaggtggagcgtttctttatggctgttactcttgttactcttcctgatgaattagatggtgttctggagaatattctgactagcactgacaagcccagcttgtctcagaccttccagcgtcttcttactcgtgggggtaaaatcgtttcttctgttgattcaggtatttctcagacttcagttgctttagtttctcgtgcttctgattcttcctctggcaatgggcgtggtcgcggtcgtggccatggtcaagggggtcgagaacagcgccctcagtgtaactattgtaagaatcttggccatcttgaagaacgttgttacaccaagtatcctcatctccgaccatcatccaccgctaatccttctcaggctaacattccactagcatcggcctcttctgatcatgttactctttctgctgtcgattatgagactctccaagctctcttccggaagatgcatccttcatcccctgttcctcgtactggcccaaccttggatcctggtaatcatgttgcttgtctttcacaatcttcacttggaccttggattattgactctggggccactaatcacctgtgtggtaatagagatcttttttcttctcttactctttctcctaagttaccttttattactcttgctgatagcaccaaggccatggttcgtggtatttgccaagcacgtcttactccttcctttaccttgacttctgtttattttatccctggcatcccatttaatttgatatccgttagccaactaatccgttccctttctttccttgttactttcactaaaaagtccgtttctatgcaggatctgggtacggggaggacaattggcatgggacatgagtcacggggtctctattacttggctgagtcacgatctcctgttgcttgttctctctcagagtcaccagagctactccatagtcgcatgggtcatccgagtctttccaagcttcagcgcatggttccttttctttccagtcttcaatcctttgattgtcaatcctgtcagcaagggaagcacactcactcctcctttgcaaatcgagtcaataaacaagctaatgctccttttgctcatgtccattcagatatttggggtccgagtctaacagtgtctgttcttggttttcagtattttgttacctttattgatgatttttcccgttgtacttgggtttatttaatgaaaagtcgttctgatttattttccatttatcaaaagttttgtgctgaaatccttactcagtttcatactcctattcgtattttgcgtagtgataatgctaaagaatatgtctcacactttttctgagtttttggccaaacagggaactatccaccaaactacctgtccacatactccacaacaaaatggagttgccgagcataaaaatcgtcatttaattgaaatagctcgtactcttctattgcatatgaatgtccctcttcgattttgggttgatgccgttattatctcttgcttctacatcaatcgtatgccctcttccgttcttaataatgcagttccttacaatcttttgttccctgatagtcctttgtatcctctgcctttgcatgtttttgggagtacttgttttgttcatgaccttactcctggtagagataaattaacatctaaggctttcaagtgtgtcttccttggctacccccgttttcagaagggttatcgttgttactctcctgatcctcgtcgtttcattgtgtctgctgatgttacttttcaggatcagcaacctttctattgtacttctcctgccgtgtcacaggtttctcacattcttcctttaccttttcttgacgcttctattccagttacagatggcaatccaattgagtaaccttctcctgtccatgtttctccggctcctgctcgtcccctacaagtttatcagcgtcgtccccagccagctttggatgttgcacccccttctgactcacggcctttgccacttgcctcgcctcctttggatcctgcctcggacactactcctattgcctcccgcataggtactcattctacccgtaatcctcatcctttatatgcctttttgggttatgaccgaatttcttttccacattatacctttgtttcgagtctttcttccgtttctattcccaagactacaggtgaggctctcgcccatccaggttggcgccaagctatgctagatgaaatgagtgcacttcattctactggtacataggagcttgttcctgctcctcctggaaaatctttggttggttgtcgctgggtatttactgtcaaggttggtcctgatggccatgttgaccgtctcaaggctcacttggttgccaagagttttactcagatcttcggcattgattatagtgacaccttctctcctgtcgctaaaatggcatctgttcgcctgtttcttgcccttgctggtattcgtcactggccactcctttaacttgatattaagaatgcctttctccatggtgacttacaggaagaaatctacatggagtaaccgcctggctttgttgctcagggggggtctgggttggtgtgtaagcttcgtaagtccttgtatggcctcaagcagtctcctcgagcatggtttagtcgtttcagttctgctgttcaggcttttgggttggttcgtagtgaagtggatcattcagtctttcataggcacacatcttctgataagtgtatctatcttttggtatattttgatgacatcattattactggtagtgatcaacctggaattgaccagttgaagcaatacttgtttagtcaatttcagacaaaagatcttggtaagcttcgttacttcttgggtattgaagtggcacggtctagacagggcatttccatctgtcaaaggaaatatgccttagacatcttagaggagactggtatgttggggtgtaaaccagttgatacacccatggatcctaatatcaagttattgcctgaacagggggagccattatctaatcctggtccttatcgaaggttagttgggaagctaaattacctcactgtgactaagccagatatctcgtttgctgttggtgtggctagtcaattccttgattccccatgtgattctcattgggatgcagctattcgtatcctccagtatatcaaaagagcactaggaaaaggtttactatattcggatcagggacacagagatctgtggttactctgatgctgattgggcagggtcaccctcagacaaacgatctacttcaggttattgcatcttctttggtgggaacctaatctcttggaagagtaagaaacaaactgttgtagctcgatctagtgcagatgctgagtatcgtgcaatgggggtcgctgcctgtgaactcatctggttaaagcagttgattaaggaacttcatctttgtgcacaatgacagcccatgactcttatttgtgacaatcaagccgctctacatatatcctctaatcctgtttttcataagaggactaaacatatagaaatcgattgtcacttcattcgagaaaagattcagtcagggaaaattcaaacagcatttgtcaactccaacgatcaactcgcagatatcttcaccaaagctcttaggggtcctcgggttgaatatatatgtaacaagttgtgtgctcacaatatatacgcaccagcttgagggggagtgttagaatactatagtatatataatagaataagtcccacatcatgtatattgcatcatggtttctgtacaatttaatataaatcactccctgtgtgatcatataagacacacaattctccgatctcaagtcaatataaaggctaaaaatcagttatgggtactaaagatagaagaaagttaaatcagtaaatgcctcagtaacttcagtaaagtagataatcagaggagaatgctgagaaaagtttattcttcagcatattatataaatttatattataccttacctcacacacatgacacattacacaacaaacaaggtcaataataaaccatgatttttagtttttagtgaggaaggggttgctgacctgaataaagtgaaccagctccacttcaaaatggacttcatcgtaaccttctattacaggcatcagaggagactcagtcaaatactgactggtgacatatataacagccttctcttcccgaaccattgttcccatcgccatttcaaggcctttaggtacctgatttgcattaagaggagggtaacagccaatgcgaatagcatataagtattaacttattaacattaaagaatattttcagatattgccagcacaattatatcagggagctgcatggcttgctggaatcatgtaatcaggaaataaaaaacatggccatatccatatcagatcatagccaaactatttgacatattaacagaaaccaactcagtataagttaccatgatatcattatcataaataataaacaaacaaggcatgaagagatttaaatacctctgattttccaaaagtaaagaagtatggttctccttccgtatgtgacatgatcaatttcccagtaactgtctttgctgaaatcctggtaacaacgaaatgaaatatcatcagaaactcccatcaacccattatacagattacagcctgacataagaagagatgaacaataggaaaaaggaaaccaagatttgttttacaaagccttcagttcataaggttctcttggagattcccagccctgcccttcacattctacctacacttgagagttaactttagaaacatagtgtaattgagactattgaataacaatgactgaatggtgatagtgaccatttttaaattaaattaaatttatgatgagaacaaaaccaacaaaaaaattcaactaaaaacaaaatttacatatttgcagcgttaaaaacatgtagaaacctaccaacaaatgcattcatgcttcctcctaatacatgaagcaatgttcaaaattgagggtttgcaaatgcaacacaaccacaagaatggctgcattcacccacaattttggtaatcccaacccaactacaaccgcaatttaaaagcatgttatgaaatctaaaatttccaaataagggagcaaattcaaattttccatatcggcgatgtattcaacaattgtgtcagacataacacagctctttttccttttccttttgggtttgacatccatacttcccatgccatccatccaagatgatagaacgtgcaaaataaatttataaaactatgcaacaatatattctagctatttataccttttttacaactcccaaatcgtcagtaacaacctgcaaatgtacaaaaaaaaaaaaagcaagaaatgaggattacgcatcagagatcaataacaagggatagttattctgaaaaaaaaaaatccacattaaatgagaaaaccagtaatgcagtaatgggaaacacaacaacaatattgatggatatcaaaataaggatgaacactggtaaaacaaaacccttaagtgttgaaaaagataacaaatgaaaagaatttttaaattttggtacatgaaaaggatgtctttttaatcatttaaaagaacccccaattaataatgggaagctaacaaatgcacaagtgtagatagaaacgaaaataatcatcaggataacaacgatacaggacataaacattagaataaaaaacaaatctcaatgttcacatccttgccttggctttgaaaaattctatcagctcaatttcgaaatgaagttcatcatcctttggaaaaccatcaggagcagaaacaggacaatcatcctcaccataatgcaactgaggcttcatcttgaactgcaataaataatagaatctagttaataaaaaaataattcagtataatcagataattccttttcaattcccaacaaaaatttattaaagaaaatatcacaaacaaagaataagaaaacaacctaatagaaagcgaagaattgagggggggggggatgaaaatgaagccagctcagaattgtccccatatccaactgaggatccaccaaagtaatacccctaaagaaaacatttgaagatcccatcatatattagaatttgactttcattattcccctacaagtgttgattactcaaaccattaatatgcgttagaaaacaataatgcatttcaaagatgatacctcagatccataagaaaaccacagattggaccagccaaaactaaagcaaggaaacaagaacctaatgctcaagaaaatcaacatattacattaaaaatttaaaatagaagtatcaggtaccaatcaattttcctcctctttcattataatagtagaagtcaaatgaaacaaaattgtctctgtattgcaccatgtattaaattaagcttttaaatttaaattcataataaatcaagattaatgagaagctccagtataatatagattaaacatgagacaaagataactcgagcttttagtgtccagcaaaaaggatatagcagaaagacaataatattcaatgattagtatgttaccattgccacttcgcccttcaacattgatggaattccttctagcaatcccaataacatcttgcttttccccaaaacatgtcttattgggatgcccttgttgcagtgacataaaaggtcatcaacccaacaactatgtcaattaaagaagacaataatttggcattaagtatactatctttacttaaagcctaattacaaaatcttttctacagtggggtgtttcacaatgacatctgtaagtcaagtcacgtatttgtaatccctatcagttgacagcagggtctaacaacaagtgctccacccatttgtttcaattctcaaacaaaaatacaacaaccagtaaccaggacaaacatatttttttttaataaaataaaatgcaagacaaaaccaacataaatgactatcatctagataatcaaaacaaaccaaaaaggtacctagcagcttaaatcacctcacctccataatctgatctggtagattccacaagtactccatccaaagttcgaatcgtgcagtgatagataatctgagacacattacataacaaattcctttataaatatcaacccactaaagaaaacacaacaaacattggttcccttagcaaagcatttctagcttgcctaaatacatcataaaaatgcacatccacaacccaataaaaacagaaataacctggtcaccatcagaaggtccagcatcacccccaccaggcctcatcaaagctttcatcaaactcccaggcacaattttcttcttccttcattttcacaaagacaacatttagaacacaaccacaacaacctaaaccaaaccacgaaaaattatcaaaataataatgataaaaaaatctacctattctcatcctctgaaggtggcttcttctttggtgtaacttcctgtacagcatctttatttgcagccatagccactgaattcccgaacagggttgcagccaccaaaacctataaaactgtaaacttcaattaattaggcccaaaatccagtctttggcatttggcaaacccaaatttccaaaagggtactctaattatgctgaattgttgacaaaatctttcagtattggtaggaaatatagaaattcagattattttttttcctgttttctttatttggggtgaggctcagagttcagaaggttttgtatttactgaagaaaagtttagttagttgggaagttggtgagaaaaacaaaagcaagtgtaaatttgttgtatttattggactattctagaatgccaaaacatgcatttaaattagaaagggtaacgaaagaagaagaaatgacgttcgttgttaacctgatttgaagcagtctttgactaatctttgggaagaagaggcggattttactatacaccctgttacgttggtgtgtagggccaagactaaggtgggagaggaagagcaccatgggaaaggataatttaaaccgtcagatcctttcaattttttatctgacggagagagaaggacaggggaaaaagacgtgggtagggtcagaagactgaatatgttttccatcctataaaattttgaaaaatattaatttcgtatattaaatttttttattaatttaacttttctaaaaataaaacatatttttgttcacagttgtaatttcaatagacaataataaatttacacttttaatttaaatataaataaattaaataatttgtgatgattaaaatttttcaaaataaattaaataattttttgcaactgaaatctacaaaaattgtaatttttgtcacttttttttatttttttgcattttctagtaaaatcaaggaggaagatgaagtaacaacatgttctagtgttttgtgagtgtgttgctatcgtcttagtgtgtcacttgaaacaatagagagaaaaagtaattaaatttattaatcacgtcaagaaattgtctaatagatttatcactagataccaataaaaatatatttcatatttataggaatcaaattgataggaaaattttatgatgacaaaattaattttttttaaattttataaggatctcaaacatattttatccaaaaataaaataagaaactatttttatattttagccaactaaaaaaataaatatatatatatatatatatatataaaaagcgctaaactaaaaggtatttaaataaacctttattttttatggtgagaaacttgtttagctttcactctactacggttaacccttgttatgtatggtgcattagtgcacatattattttatttcactaaaatataattttgctctcattttattttattttattaagatctttaaatttaaaaaaaaaatcctcaaaaaaatgaaaaatttcacttttaattctttgaagttttttttatttttgttagtctaaattgattttttatcttttctattaacaatgttaattttaattaatatgataaatattggtgtaacatttcttgtaatttgttatttgtcactaaattaatcaagttagtgtaataaattataaaataactaatttaatgtaaaaaaattaaaatatcaaaatgtaattttcaaaacttaaaaaatcaatttaaaaccaaaatgttataacaacataataaaagcatattttaatatttttcttttatctattgagtattattattcaaaagataataatatatatatataattttgctagttggtttgtgtaaaatataatgatttaaatatatatatatatatggtctctcaaatttgagataagtttatttttatctattaaattaaaaatatgttttgtcttcaaaattcgaaaataactactttcattcaatataaatacacttataattaggatgaaaatggattgggttggatcgggtcctacctaagtctggtctagcttattatatatttttattgttcaagtttggatttgttacttgttatgaacctattttaggtttgagtctaacctttgtataagctcgttaggcccattagatcatttaaaggtatgtttcatattaagaagtgtaaaaaaaatattttttaagacaaaatcaaaaaattcattaaaaaaacaataagacaattttaaacaataggatattggcaaaatttgtcactcatctatacttatacgaattaacctatttcaaacattaattaaaattatttaaatcgtcaaactactaaaataattttataatttacataaagtaattataatattatatatcatattaataataattttttattataaaatattattgttaaacatatcagtccatcaggcttaatagatttttcttaaagcttgtggcttagtctatttaattaaataagcttttaaaaagtttgagcttggtctttttgtcaaatgagttgggacaaggcaggccttaaacagaccaagctataggccctcaatgggcgagctagcctactttcactcctagttatagcacttattgtttaaatggttaatgacattcacatcatcatcatgtcttgtgaaaatatttaactttttggcttaaatattttttagtccctcaaatttaagataaaattccttttggtcccttaaattccaaagtgatattttttagtctcctaatttggaaataactcattttgatcctaaaagttaatgttatatctttgcatcatatctgcattttttctatctacttttaattttcacattttcaaaatcattcttcttttcttcctctgctacttgttttattcctcacttgttttaattgtccaaacggaaaaggagggccactagtcctctccctcaacctgaaaatgagttaatggctgggacatttgattcactccattttaaggatgctattgttggtcaacgtttcaacgtcatcacgagcgtgttaaatccacatccctggttttaattatgacaaaccactagcaattaaattgaaaggatgatggaattaagtgatggctaacattctacttaagtatttcaatgttatttactttgagaagaatatatgttttaattctgagctactcaaaataatactcagaaaggttcagagaattgttgtcaaagttaagaacttaaaagaagtcttgaaacccatcaaaatgatgacatttgcttcactttgattatttagcttttggcaaaatactgaattgttggatataaggggagtagcaagaagatgaagctaaagaagaaacttgtgtcttaaaagaatgttttgaacttttcacatgccaaggaatttttaatttgatcaagtgtatgataggctaatcttatgatctttgcattgtatgaacatgatcattaacttgcatacatgatttcattaaagcataaaagcaatacatgttttcaaaggaaatgaaattctcatggttaagtttttggaaaaacaaaatttcactactttaatcgattacacatcgaattaatcgattacaagcttctattttaattttttggaaagccatgtaaaacattttaattgattactatgttgttgtaatcgattacatagcacaaaacgaaaatcatgttttcctattttaattgattaccatgaatcgtaatagattactgaagtgcatttttatatgtgcctgaatggtttaatcgattaccatattttataatcgattacataagtacattctggatttgtgcctatctgctttaatcgattaccacaatatgcaatcgattacacaagcctgttttaaaactaaacgtgtttgttttaatcaattactttgctcgttgaaattttccagaatgacctatgaacattttaatcgattatttgacaatttaatcgattacacgtgataatttaatcgattacttgatgctttaatcgattaaattttgttataaaagtttgttataaatagattgaagacttgtctgaaaacttaacttataaacttcgatttttctgagcatacattagtcttctcaaagttagaaaggattttctgagttagtaaagctcttgtcccactctttaatcttcatggtgctttgaaaaatttctcaggcaagattttgaaagatattttggagagaaagttctgaatttaatttctgcatttcaactctgattggtaaaccatattcatttatattcattggatcttcaggttgtctctctccattatctcatgttgtaaattcgtttttgtattcttgatagtttgaaattattgtaaagggttctttaagctttttttagagtggtttctctagagggaagagtagagaagggttctctatgtcttgatcattaggaatctaattgggttttagatcggcaatgctttatggagaggaatgttggccagcacataggcaacatgagcataaaataggggtagcagaaatgaggatgttaaggtggatgtgcggatatacgaagatggataagataagaaatgaggatattcgacgaaaagtatcagtggtaccagtatgtgaaaagatgagggagcatagattgagatggtttgggcatgttatgagacggccattagatgctctgtcagaacaagagtctgttaccaagagctagatacaaagagaggtagaggtcgaccaaaacttacctggggaaaggtagttaaacaagacctaatggagtgggatatagattggcggacggtatgtcttaggacggagtggagaaaagctataagtctggtggagggttaaaccctttagtagttctatgttccagttgttcccttgttttaattcttttcttcttcttttctcttctcctctcaccattcttttattttaactttgtttctctcttttgttcttttttcgatttatcattgggttcatctaccaccgaccccaattaatttgagttaaaggtgctgttgatgttgatgttgatatctaggtttgataaataatgattgttgtaaagcttgtaagaactgaaattaataatagtagaactctaatctagtattgattagaagaaactggatgtagtttctcttgaaaagtgaaccaatataaattattgtgttgttttctattccttaatctcttcttgttatcttgatcattgattcttgaagttatcttcgctacccaacaagctctgcttttagcaattgttttctttggctgagtggtttgattcaattgcagtatttttggttttattgtaattaagatcctataaactctgattttctaaaaagttttaaaaggataagtttaaaccaattcacccccttcttgattattgtggatattcctattgttttcaattggtatcaagagcaggttcttgagtgttattcaagatcactatctttctttaaaaagaaaatgaataccgcacaaattacctttaaggagggtgcctccctcaatcgtcctctgatgtttgaaggagagcatttcaatttttgaaaaaatagaatgaaaatcttcattcaatcaaatgacccaggtgcttggaatgcaatagaaaaaggttgtgtgattcctataaaaattgttgataatgatatgattcccaaagaatgggatgaaatgacaggtgttgaaaagagagttgttcagtatgatttcaaaactaagaacatgattacttctgcactttcttctgatgaattttttagaactgttaggtgcaaaagtgtaaaagagatgtgggaaatgttagaggttactcatgaaggcactaacgaagttagaagatcaaggaagcatgccttgattcatgagtatgagatgttcaagatgaactccacaaaaaacatatctcaactccaaacaagattcacccacatagtaaatcatcttcttggtcttgggaagatttttgatactaaaaagttgaacagcaaaatcttaaagtgcctcacaagaccatgacaaccaaaggtgacagcaatcaaagaatcaaaatatttgtccaagatgtctatggctgcactttttggtaagcttcttgaatatgaacttgaaatgtcacaactaaccaatgcagaagatgcaaacaacaaacataaaagcatagccttgaaagttgcatcctctaaaatggaaaagggaagaagattcaagtgaagaagatgatgatgacaacatgaatctaattgtcaaaaagttcagcaaattcatgagaagaaacaagaacagaagattcacaaagttcaacaacaacaacaaaaagagtgacaacaacaacaacacaaacttcacttgttttgaatgtggtaagtttgaccacattaaatctgaatgctccattttcttgaaaaagcaacaaggtgaaaagaaaacaaagaaagataggaaacctaagaaagcctatataacacgggaagacaatgagttaacaacttctgaatcatcaagtgagaatgaagaagcaaatgtttgttaactcaaaaattttctaatgctgaaactaaggtaaattctgaatttgatcaaattgttgatgctttccatgaaatgcatgaagaagcccaaaaacttgcaaaatccaacaataagctaaaaggaaatcttagatggcatgttacaaaaattgcttaaatggaaactgatatttgtaccttgaaagaagaaaatgaaaaacttgtttcaagctacaaaatgaatgggtgtgtatgtgcttcttcttcatcaaatgttgacaaatacaaaactttgcaagaagagtttgatgagttcaaaaagagtcaaggtaaaaaacatatgttagcactttcagaaaataattacttgttgatcttttgaaaaggctttataaggaaaatgcaagttagctaaaatgctcaataagcaaaaatatgttggagatacttctggattgggtacaaacatggatcaaaatcatttggaaaaaccaagtttgtgcctccaaaacagaaacatcaaaaagttatttcaaaaacaaagttcaatcacatgactcattttgaaagatcatcaagagctgtaacttgtaactattgtatgaagaaaggtcacacatctaatagatgttatgctaagagattctatgtgccaaatggagatggcatttgggtgccaaagaaaaagaaaatagctaacccctatgaacccaacatcaatcaggtaccttcctttgtgaattgatttgaattttacagatgtgtctaagagcaagatcatcattatgatatcttgacagtggttgctctagacacatgaccggtgacatatcaatgctcacaaatttgactcttaaagatggaggatttatcacttctggagacaacaacaaaagaaagatagttggtgaaggaaatataggatacaactttaagatcaagatcagaaatgttctctatgtggaaggttttaagcacaatctcctaagtataagccaactatgtgacaaaggattcaaagtgtaattcaatgaaaactgttgtatatgtgatggtcaaaccgatgaggtgattcatataggtaaaagaaaaggtaatatctatttactctctatagatcatgcttatttcacaacacaaattttctaataagtaaagttaatgaaacttggttatggcatagaagggcaagtcacattaacatgcatcatatgaacaaacttatttgaaaagacttagttattggcttacccaaactcaagtttgaaaaggacaaactatgtgatgcttgtcaaaaggggaaacaaacaaagaattcctttcaaagtaaaatcaagactccttgaattacttcacatggatttatttggtccttctagaactatgagtttaggaggtaatttctatgggcttgtaattgttgacgactattctagatttacatggactttgtttttaagatccaagagtgatgttttcaatgcttttagaaaattagccaaactttctcaaaatgaaaagggaagcaaaattatctcaataagaagtaatcatggtaggaaattccaaaatgaatattttgaaaaattctgtgaagaaaatgaaattaaccataatttttcatctcgaagaataccccagcaaaatggtgttgtggagaggaaaaatagatcccttgaagaagaagctagaactcttcttagtgagacaaatttgtctaaacatttttgggcggatgttgtaagtacaatttgctacactttgtatatattactaataaagcctattttgaagaaaactccttatgaactatacaaaggtagaaaaccaaacatttttcattttagagcatttggctgcaagtgttatgtattgaacaatgataaatactcacttggtaaatttgatgcaaaagctgatgaagccctcatccttggatattcattacaaagtaaagcatatagagttttcaataaaagaactttatgcatggaagaatcagttcgtgttatttgtgatgaatctaactcctctaaagaggaaaagaagtgtgaaaatgatgcaggtcctttagaagagtttatacaacttaatggatcaatggataaagaaaaggaagaaccaattgctgaataaaaccattaactccagtctaagagccaaaagattggagaactacaagagatctctctcttgacaatataattggtgaagttaaaaagggagtatccactagatcttcattgagaaatctatgttgtaatatggcttttgtttcgcaaatagaacctaagagtattgatcaagccttacttgatgaacattggatgcatgccatgcatgaagaactgaatcaatttaagaggaatgaagtttgaaaacttgttcctagacgttcttcttttaaaactatagacactaaatgagtttttagaaacaaacttgatgaaagtggtatcgtagtcaaaagcaaagctagataggttgcaaaagattacaactaagaggaaggcattgactatgaagagacctatgctccagtagcaaggttagaagccattgaaaatacaatgaacacacttcaagtaaaccaagagggggatgaattggtttaaaccaggaatttaaagttttacttaaaacaatttgtggaatttataatatggatcgtattacttaaaatctttttaaaacctgaacctttctttcaaccaagatcacccttggaattcaagtaatgccagaaaattagtcttgttgataatttcttgatcacccaaaaaacaaacaatgagaaatgaacagaattagaataaagaactcaaagatctataccggttcacctcacaaccttggaggctacattcagtgacttccaaccaactcttggttagagattccactaaaacaaatattattctttacaagcttttacaacagatctcccttgtcaaactagacaaagatacaaaatctaaaccctatagatttcttaagatcaagaacctgagaacacaactcagttctaccctctagagaacccttctccagaaacaactttaaagaaactatttgtttttagaaaactacataaacttttaagcaaacaaaagaactaacacagtctaaagttcaagaaagatatcacctcatgatccttagcaaatgaatgagatgaacactaccaatcaaatagagtttgaatgcatgatgtagagaacagctttcttgaagacctttgtttaaaaccttgcttaaaacttcatcaacaaacaattatgaatcctatgttcagatgaagattgttattcactcaaaacgaactttttcttagattctaaagctttaggagtattggatatttcgtagaaatgatttttagaacattgcaaaacaatagacccacaagctatttgtagaaaaacagatttaacataatgtaatcgattaaatcgcaagtgtagtcgattaatttaacaaatataatcgattaatatactatttaatcaattaaaatgttcttaagctttctaaaaaatgtttatgaacataataatcgaatataatgacaagtaatcgattaaagcagcaaagcatagtttttcaataggcttatgtaatcgattacgattcatggtaattgattaaagcagcacaacatgttttccaggtataccctatgtaatcaattacaataaatggtaatcaattaaagcagcaatgcatgtaaaacaacaagttttcatttttcaaaaacttcaacaatgagaatgtgaactttgaaaaatcatttaaacactttagtttattaatcaaagacatgtatgcatgaggatgagaatgcaaatgcaatgaaggatcataaggaaatacacttgagtcacttagataattacaaatgccatcaaaatgattgggcatgtaaaaagttaaaacttcaagtcatccttgcttcaatcttcttgcagcttcctttaaatccaacagccattaggttgctacttgcatatgcatgtttgatggattttaaactatttcaaatggatgttaaaagtgatttcttaaatggatatattgaggagaaaatctatgtggagcaacctccgggttttgcagatttcaaatatccaaaccatgttttcaaacttaagaaagctctttatggtttaaaaccagatccaaggtcttggtatgagagattgtgcaaatttctacttgatcaatctttcataagaggacatgttaataaaaccttattcatcaaaaggcaaagcaatgatatcttattggttcaaatatatgttgatgatataatttttggttcaactaatcaatccttgtgcaaagaattttctatctctatgcagaatgagtttgagatgtctatgatgggagaattaacattctttcttggacttcaagtgaagcaaatgaagaataggacatttctaactcagaccaaatactatcttgaagtgatcaaaaagtttaacatggagaaaagtaaggatgttgcaactccaatgtcaacatcaacctatcttgattcagatgaaaaagggaagaaggttgttaggatttttacggcaagcgtaccgttgtatcgttgcaagttacaaatttgtaaaagttcgtctccacaaggatttgagtttacgtcggttggtttaaattgttaccagtttggtagttatatacagatgataaaaacgaagattcattttgttgttttgtttgttaacgtaaagcaaagattacggaaaacaaataaatgattacgaaaaataaataaacgagtacaagtcaaggaagtgtaggattggattttgtctttcttatccctttaattaattttacctatgcattttctattcttattgccgcacacatttaaatatcatatccctaattcgattcctcgcaattaaagccctaaggatattttactaaatatcgattcctcgtatatttaattaaataccctagcattaagatcttattcacgtgtttaatgcgatcaaaacgctaagccctattcctagcaacgtaacgtagtgagtgatttaattcaattcaaaccctaaatttactttccagtcgcctttagggttaaattcatgaaactaatgatcaattagaatcaagcattaagcgtagaataaaatcaccaataaggaatagaacaatgcataaagaattaaaagagcatagatttaagaagagtacgtccaatccatagagaagtttaagcgaacattggcagaacctcctcaagagaaccactgactaagctcatcatcgatcctcttttcggcagaatctccttatataattcaatcttcctcacttccctaagcttctaccctcacttaggaactaaaacatgctagaaatggaataagtaggtaaattggagtgaaaagcatgccctcagcctccaaaatccgtccatatatataggttttgtggacctggctgctttggtcgtccaggccaccatttccttcacaaattgggcacctgggtgagctaaagtgctttcttggaacctgttactcgcccaggcgagtgaaataggcatagagtggccgcctgggcgagcttaaagcttagtcatgaagaaatccttgggccttggtgcttcttgggcctggaatgctattgggacttcattcttaccttagttcactccctgctcttagtgtttgcaagcttggttcttccgtaaccttcagacctagcaaaattgaatcattcgattggacgaaatcttttcaaaatatgaaagcatgacttacctttatataaccttcaattgactaggtttctagggttaacttgtgaataaatcaaatcaaaataacggataagtgccatatttgaatcctatttttactaaaatgtggcacttatcaactccccctaacctagaatcttgcttgtcctcaaggaaaggtaagaatatcatgctttgacaagaatcaacttaaattcgatcaaaacagatttttcaaaaagtagttaaccttgatacttttgagaaaacaaaatgatggattttcatgaaatcaaatgaggttagagtcaaatttatacttcatttcaaaaaaagacctaagaggaaacatttgaatgatttcagacagaggaaaacctctcaataagtgtttaattctcccacaggtaagtgtttagttcacatccatcactgatatatcatagataaattttgcagttcattttccatcaaatcataatacatactcatcacggatcattaggtcttttatggctgagtttggttagaaagaaatcttggtttttctggatattcaaatgaccttaggattaggagagcaaaatagaaatagagacatttagatcattacctcctattccttttctctttttccaagatatctatttttatcatttttctttttcacccaatcttttcatcacaagaattttatttcctttttcttttctttttcttttctttctttttctttttcaagaatagcacataaccactactaaaatccttttcataacataaactatccaaaaagaaattttccatcacaaatcattccctttttgctctcctaatccttaggtaagttatggaattcctatcctaggttagggtttcaataaaatatcaactgttaaggctcaaaggggtttgcaaaggataaatcatttaatatatttaggatagctttttggccagtggcttataacatgtttaaaaagaaagacgaccgaaatcatatccatgaatcatatgttatgacaattagaaatttattgtgtatgatttctgtttggatacacacactcacttgggctttaaggtctgttttcatgttttcaatcaaatcacttgtttcccactgaagttatttatcaatttccatgtaaaaaagacttttaccttgatttgatttttctgaaaaaaccatttatttttgtttttcgtttctcaaggttttcctacaaaaaactttatttttgttttgtgttctgattcttaaaagaagtttcaaaataattttcttctgattcttttcaaaacatcatatatcaaaaaatattttccatttttatcccaaattttttttcctaaattactattttatttacaaaattatgttatgatatacgaaaagaatgtgtgaaactttctcaaaaagtgtttttcttgtgcacactaaaaaatatttcctaaatgtgcatcgcttcaacataagctatatgcgaaatatttatcaaaatagtaacataattactgtaattcaaccattactacccatatgcataaaaaataaccatgacagtgcataagaaaccaaagtatgcaagtatgtataaagccataaagaaagctataaataaatcaaaaagagtgtcatagattttgaaggtccgtaagatatgctgccaggtcttgttccagatcatccgtcgcctctcctccctctgctgctgctgtagctgcaggttcttcagctgcagggtcctgctgggttgtggagcctcccacctcctcctgaaaaacaggcctgtccccaggccatgctacatgtgctctgaactgatcgggagttggccatgggaacgggctaggatcctgtcggtgctaatgcatagtatagttgtagaaactctcgtttagctacatttgtcctctgaatttggcagcttgctgctccgctatatgctgcatgtatgtgtgcatttgaagctccattctctgcatgtgggcagagatagactccaaagaagctggctcaggagcgggctgctgctctacctatcttgctaaacagtatttttcaataaaagcacggttaataggagggcgaatagtcctagagggatggacttggattccaaataattggcataaaccagtaatcaatgcagggaacccaagtgccctattagctcgctcagggttaaggggatgcctaggtggctctaggatgacaaattggtggatagcatctgaaatgatttgagccacatctacactaagttgtgtcatgatactataggctagttgacacttaagcatgggaagatcagaattgtggtcactaggcatgatgttgcttagcaagaaggtcatctatatttgggtaagggtagtcatattagttctcatcaatcttaccctattacctgctatattgcgagcaaaatcgtaccctggaatgcaaagaagttgtctcatggcttcttcatcaaagtcatttcgcctttccatgtactcacaaaggtgaccttctgggaggacaaggggattccctaaaaattgatttatggcatcggagtcataggggatccattggcctctgacaaatgatcttttgtcaaatagggctccctctaattgccaggcatttgcatagaactccagaactatctcagggtcaaatttttgcaaaggggtagctagtggcctccattttcttcggtcaagctcatctgaaaactcactgtattcttcattaaacaattgaactctccgttctttgaggaaggaccaatttttgatggcttcaaagcggttttgatgctccttgcttctaaatcgttgctcatcataaataaagtcttcggtggaggtccactagtcccttcatttcgagctcttttgtgctggagtttctttggggccatttgaaataattactcaaaaacagttttagcattttaacaagcatggtgataagtggcagccaatgtgatatcaagaccctttgcaaatgaacacacaattcctatattgctaatgcacaaatgagttcaaggaattcagtcttatgcttgctgcattttgtgcacaattcactcatatgtatgacatatactaagtgctgaattttcctatgctacagccttggcaatttagttcttcaccatgtcaaaataacaagccatatgaatgctttggttaaaatgcacatattgatgcttccatatgaatgctttggcctaatttatgattatgacaatcatggaaggtgttttaaaatcaattttgtgaaccattagtgtgcaacataaaaactgatttcattgtggcattttgacaaacacctagtgtgcacaaagttttggaccttgaaacggttaacttggcatatacctataccaaaattttgcaaagaaagaggagagagaggtgaccaattacatttatacacagcaaattaaacaaaacatggtagaatcatcattcctatttttttctaacctagactttaaagatgatgcaaaaaggatgctaaatataaacatgcaagcatacaaagagggataaaattcaaaacttgaattgatgcaataaggagatacttacttgggaccaaaaggtaagaagaagcaaggtaatggagggtgtagtagaagcctgggcgagcttatggtgaaggaagaaaagcacaacaaggtgaatgatgaattttgggtaaattttgagttttacctttgctgtgggtggtctggacgtgtaggctcgcccaggtgaccaatttggcctgggttcactcgcctgggcgagttaaagctgcttttttttagataaaagatattacttataatatatacaatttatactacttatttatattctaacctatatgtactactttagaaatatatatatatatatatatatatatatatatatataaacataagaatacctttctaggttgcctcctagaagcgcttattttacgtcattagctggacgcgttgcagctcaaatgtcttgaagttgtatcacagtggtgagcctttcaaattcaccacctagatacggcttgagtctgcttccatttacagtccacattctctttgtactggggtcctcgagtatcacaactccatgtgacttgacttcctttataatgaaaggtccgaaccacttggacttcaactttcctggaaacaatctcaatcgagaattaaataacaaaacattttgtccaggatgaaaattccttttcacaagctttttatcatgataaaatttaattttttccttataaagtttggaattttcgtatgctgaaagcctcagttcctctaactgatgtagttgtagcttcctatattcacctgcaagattagaatcaaaattaaagaattttaaagcccaaaaagccttgtgttccaattccactggtaagtggaaagatttgccataaaccagctgaaatggtgtaagccctgtgggtgctttaaatgttgtctagtatgcccaaagagtttcatcaagtttctgagaccaatctttccgtgactgggcaactgtcttttctaaaattctcttgatttctctgtttgaaacttcagcctgcccattagtctgcggatgatacggagaaactactttatgtcgaacaccatcatgttgtaggaccttttgaagttgagcattacaaaaatgtgatcctctgtcactgattaatgcacgaggtgttccaaatctggagaaaatatttcttttcaagaagcgaataactgtctttgagtcatctttctgcgcaactattgcttctacccattttgttacataatccactgccaacaaaatatattcatttgcatacgatgatggaaatggaccaataaaatctattccccaacaatcaaaggcttcgacttctaaaatattttgcagaggcatttcatttcttttagaaattcctccagtcttctggcaattgtcacacctttgcacatattcatgggcgtccttgaacaatgtaggccagtagaaacctgtttgcagatcttttgcagtagttctttctcctttataatgcccttcataaggtgagttgtgacaatgccacagaattttccttgcctcttcctgtgtcacacattttctcaaaaggttatcagaaccaatcttgaaaagatatggatcatcccacacaaaatatttagcatcgctgagaaacttcctcctttggtgccaagaataatcttccgggattgcaccaactaccttaaaattagccatttctgcgaaccatggcctttttgagatctaaaggagtttctcgtcggggaattcttcttgtatttctggatctggggtggcttcattagtgagtttggataaatgatctgccacataattttcgcaccctttcttatcttttatttctagatcaaattcctgcaaaagtaaaatccatcggataagtatgggtttagaatcagttttaaccaatatatatttgattgcggcatgatctgtgtaaatcaccaccttagatcctatcaaatatgatctaaatttttccaagacatatactatagcaagcagttctttttcagtggttgcataattaatatgtgcctcatttaagatcttgcttgcatagtgtataacgtggaaaactttattctttctttgtcccaaaactgctcccaccgcataatcactcgcatcgcacataatttcaaaatcaagattccaatcgggtgcggtgattacgggggcggaaatcagtttttgtttcaaagtttcaaaagcttggaagcatgaattatcaaactggaatggaacttctttgtttaaaagattgctaagaggtttagcaatttttgaaaaatcttgaatgaatatcgcctgtaaaattctgcgtgtcccaagaaactttgaatgcctttgacatttcttggtggaggtaatttctcagtgacatccactttagctttttccacttcaatgccttttttggatatcttgtgacctaacacaatgccttctgtcaccataaagtgacacttttcccaattcagtacaaggttagattcaatacaacgttttaaaacaatatcaagattatacaagcatgaatcaaaagaagtaccaaaaacagagaagtcatccatgaatatttctatacttttctcgactaaatcagaaaaaatagaaaacatgcatctctggaaagtggcaggagtgttgcataaaccaaagggcattttcctatatgcaaatataccaaaagggcaagtaaatgctgttttttcttggttttgagggtcaacactaatttggttatatccagggtacccatcaagaaaacaataatattgcttacctgctaacctttctagcatttgatccataaaaggtaaaggaaaatgatccttcctggtggcgttgttgagcttcctgtagtcaatacacatttgccaaccagtgatagtacgagtaggaatcaactcgtctttatcattctttatcactgtcataccaccctttttaggcaccacttgaacgagacttacccattgacaatctgatatagggtagatcattcctgcttctaacagttttactacttcttttctcactacctccttcatggttggatttagacgtctttgtggttgtgcaacaggtttaaagtatttttccattaaaattttatgcatgcagtatgaaggactaatacctgttaagtctgataaggtccaaccaatagccttactgttttgttgtaagacgttcaccaatttcttttcttcatcctcagaaagatttgcattgatgattactggtttctgagaatttcctgcaagaaaaacatattttaaatgtgaaggaagtaccttaagttccagctttggttcctcttccttcttttcttcctttagttcttcaaatatgttttgatgattaggcacttctttgcaagagtttagttgatgaagatactctgacatgttgttatctccatcttcttcttgagttttactcaatgctttctctaaaccatctttcttgtgaaagaatcttctagagtcaaaaataacttcatcgagaacatccattctaaaacattctttcttatctacagggtgcttgatggcttcaagaacattaaaatgaacttcatcatcatgaactctgacagtgagctttccttcatcaacatcaataagaactttggcagtcttcataaagggtctgccaagaatcaatgttacttcactgtcttcatccatgttcatgactacaaagtcgacggggaagaagaatttgttgacttttaccaacacatcttcaatgatgccatagggatacttaatagatctatcagctaactacagcgtcatcctggtaggcttgattacaacctctcctatcctctttaccatggataatggtatgaggttgatgcttgctcctaagtcaagaatagattttcctacagataatttaccaattgtaacaggaattgtaaagctacctggatctctagatttttctagaagggtcttttagatgatggcattgcatcctgcatccagctttatggtctcctcatcggtgtatcttcttttcttggtgaggagatccttcatgaacttggcgtatgttggcatctgcttcaacgcctcagaaaaatggatatttattagtaacttcttgaagatgtcaaggaaacatttgtattccctttcctttgacttcttggatggagcatgtggatatggcatgttttggactgggggtggggttaaggctgctttgcctttgtcacttcttttcttttcttcatttgtcacttttctctcaattttttcattggtttcttcttcatctttttctttttctttttccaaatcttcatttttcttttcaattccttcatttttctcttcctcatttctacccactatagttccccttctagtgataattgctttacactgctctttgggattgatttgggtatttgctgagaaagatccactttcattgtcaactaactgcttggcaagctgtcccacttgtacttctaaattcttgatagaagcttcagtgttcttttgattgctgatggacatttgcataaattgtgtaagggtgtcttccacctttgtcaatctgtcagactgagcttgctatggtggatttctatttgaaggacctgaaaaggaattagaagaacttgcaaaggaattgttaggaggaattgcaaaaggagggttaatgggaacataagcattattatttttcctccaattataaggttgattagaacctagaccactgcgatatccttggtaattcccttgataattttgttgaggtcttgcttgattttgcatgtaatgtgcttcctcttcttgtggacaatcaccaggtgctgtgcaacggccattctgatggtctcccccacaaaaatcacatcttagtatttgtacttgatgagctgaatgggatttttgtgagcccccttgctgaagttgaggaatttggcctatttgtttggttaaggcctctaattgctgggctaagagcttattttgagccaagatggcactttgagtgtcgagctctagtatccctttcctctgaatgggtgacctatcatgatgagattgatagtcatttgctgctatggaatcaatgatcattatggcttcctcaaggcttttagacatcatggttcctccagctgaagcgtcaaggatcatcttggtctgaggcctcaaaccactataaaagatgtgtaattgtgcggcatcatcaaaattgtggttcgagcatctccttagtagtaacttgaatctttcccatgtctcacacaagggtttatctacaccttgagagaaagtggcaatagctgactttgcactgataaatcttgaaggagggaagaatctggagatgaatttctcttccaaatcgtcccatgtgcttatacttttatttggttgtgattgaagccatgtttctggtttacctgtcaaagaaaaaggaaaagctctgaggtaaacagcttcattgtcttcgtccgatgctcccattgtactgcatagctccatgaaagtagacaaatgcgtgtaaggatcttcatggtctagcccagcaaatggatgtgagccaatgagactgagtagtgttggcttcagctccacaaccttgttgaaaggagggatgactatgttgttgtagtgtttgggaccttgttgataagcatagtcaccaagattcctccttactggtctattttcttatccgctacaatcagccatgttgtctcttaccactggtttttcaggtgaaggaggatcaatagacgcagtttcctcggaatgcttgttggattcttgcttctttttctttctattttcctttttgttttagatatttctggatcaaactgaggtgtatctgtagaagacttacctcgcatcaagtgaaaggacgaaaactacaagattctataagcatcgaggttaacaaaataacaagaaaaagtttatatacaaaaacacgaaaataaagaacaagaaaaatattctactaaattgaaatttaaacaactaagtaaacgaatcaaatccccggcaacggcgctagaaacttgttaggatttttatggcaagcgtaccgttgtatcgttgcaagttacaaacttgtaaaagttcgtctccataaggatttgagtttacgccggttggtttaaattgttaccagtttggtagttatatacagatgataaaaatggagattcattttgttgttttgtttgtttacgtaaagtaaagattacggaaaacaaataaacaattacagaaaataaataaacgagtacaagtaaaggaagtgtaggattggattttgtctttcttatccctttaattaattttacctatgcattttctattcttattgccgcacacatttaaatatccctaattcgattcctcgcaattaaagccctaaggatattttaccaaatatcgattcctcgcatatttaattaaataccctagcattaagatcttattcacgtgtttaatgcgatcaaaacgttaagccttattcctagcaacgtaacgtagtgagtgacttcattcagttcaaaccctaaatttactttccagtcgcctttagggttaaattcatgaaactaatgatcaattagaatcaagcgttaagcgtagaataaaatcaccaataaggaatagaacaatgcataaagaattaaaagagcatagggataagaagagtacgtccaatccttagagaagtttaagcgaacattggcagaacctcctcaagagaaccactgactaaactcatcatcgatcctcttttcgacagaatctccttatataattcaatcttcctcacttccctaagcttctaccctcacttaggaactaaaacaagctagaaatggaacaagtaggtgaattggagtgaaaagcatgccctcagcctccaaaatccgtccatatatataggttttgtggacctggctgctttggtcgcctaggccaccatttccttcacaaattgggcgcctgggcgagctaaagtgctttcttggaacttgttactcgcccaggctagtgaaataggtatagaatggccgcctgggcgagcttaaagcttagtcatgaagaaatccttgggccttggtgcttcttgggcctggaatgctgttgggacttaattctttgcttagttcactccctgctcttagtttttgcaagcttggttcttccgtaaccttcagacctagcaaaattgaatcattcgattggacgaaatcttttcaaaatatgaaagcatgacttacctttatataaccatcaattgactaggtttctagggttaacttgtgaataaatcaaatcaaaataacggataagtgccatatttgaatcctatttttactaaaatgtggcacttatcaaaggttgatgagtcaaaatacagaggaatgattggatccttactatatttgactataagtagacctgatatcatgttgagtgtgtgtttatgtgcaagatatcaagcaaatcccaaagaatcacacctcatagcagtcaaaagaatcatcaaatatctcaaatcaacaccaagagttggtctatggtatcttaaaggtgcattactcaacttaattggatattttgattataactttgcagagtgcaaattggatagaaaaagcactggtggaactttccatctacttggcagctcactaatctcatggcaatgcaaaaaagcaatcttgtgttgctctatcaactgttgaagctgagtacatctctactggaagttgttgtggttaaagtctttggttgaagcaacaactacaagattttggtgtagaattaaaagaaattctcttgctatgtgacaacacaagtgccatcaacatatccaagaatccagtaatgcactcaaggaccaagcacattaagataaaacatcatttcctaagagatcatattcaaaaaggtaatatcaaaattgagttcattgatacacataatcaattggttgatatattcactaaacctttggctagagatagattttatactcttaaaaacatgctaggtatccttgatgagtctaacatttgctagcatgcttattatgtgcttatctatgtgaaattgcatcttacttaactaatcatcatatgtgcttcaaaattcaaaattggttgcataattactatgcattctgcaaaatgctctgtaataatcgattacagtacagataatcgattatttgtagtttataccaaattcagagtcatttctatgtcatgtaatcgattatctatcgatataatcgattacataagatcaaaattgaattctcaatcttaattctctatggaataattgattacctatcagaataattgattactgttcatcaaaattgaattctcaatcttaattctctctggaataatcgattacctatcaaaataattgattattgttcaatccaaaacttcttttgattcaaatgtttcctgtaataatcgattactgcaccggatatcgattacatcgttaaaaactgtcagtgttaagaatggaataatcgattacataagctcgtaattcgattacaaatggtcgttttcaaatctctgcagattttttggaactctagactgtcgtatctctaattaaattcaaaatttgaatctttcaccgagtggttatggcctagatacgtgagataattgttccaatgttcaaaattcaaatttgaactcagaattttggctataaattcagtcttggtggagaatcactcacactcatccaagcctcttgctttgtactttctgaagctcttctcttctattttctctttctctgtactacccattaacccctaccctctaaatatgccatgtctacatctaagagagtgaaaaccagcaagagaaaggttggagaatcatccagttctacaggaaattgattaaatctttggttcacagaagacacgcataaaatgacctacatgcaattcaatgccacaaaacttgttatgcctcccaaataccttgaccttgattggtttatctaggaggaatttcagttccctgctttgctagaggctcaagggctgaaaaaatttgttgaactcaagggtactttttaccctgagttagtaaaggtatttttcacatgtgttaaaggctagcatggatgggataatacgttcccaagtaaaagaggttcccatggtcatagatggtgaggtatgggaagttgttgcaagaatctcctctactggtatgaggatattcaatgaagaaatagaaggctacaacaagattgaaacttataaagatatgcttcaatatccccaagcaaggctgaagacaaggcttggtgtaggaaatattagaggggaggataggttgcttcattacatcataacttgcatcctgacccctaggtctaccaaccatgctcaaatcacggatgatgatttgcagcttgttcatggtttgaagacctctactcagattaattgggttatgatttttctagaaataatggtgaaatccaatatgctgattagttataattttccctatgttattcttgtatctaggtttatagattatttttagattgatgtaacagatgaggtggttaatcatacctctgattccaccaactttattaaggaaaaacatctgaacaatcttggcttgataaaaacagccaatggatggcaaatggctgggaaacaatctcaagctaaaggagaattaggtgttgttgaaaggggagaagaagctgaaggagaacctgcacctcaacaatattctccatttaagtctctcatgattcaaaagatagttgccttaatgtctctccaccatgagcatagggctgagactaatttagccttagaagatattcaatccaggctggagaacatggaggctaggatggttcttcatggatttaatgaactttagattaaaagcttgttgtgtttctgtctattttcttgtttttgttatgtctctatttttccgcttccttgttaagatcacttgattaatgtactgcaccatttcctacatttcagtttctatttctcactgtttgagttgctaccttttgtctttgataagccaaatagggggagaaatgaattgattgataactaagaaaaggaagtgctaactgctctgttttgctctggtctattttttttaaactattccttttaaactaactaacaatacctaagtcataagtcaaggggagcgaaaataaatgaaagaaaatgattaatgtttatgcaatcattatacttgacacttgttcttggcaaagagcttatttgatttcaggttaacaagtatgagtatcattcatcccttaaagcatttaaaagctaaacaaatgatcaatcaatatttggcatgctcaaagtcaaaaagggggagatttttggatatagggggagtagcaagaagatgaagctaaagaagaagcttgtgccttaaaagaatgttttgagcttttcacatgccaatgaatttttagtttgatcaagtgtatgcgaggctaatcttatgatccttgcattgcatgaaaatgatcattaacttgcatacatgatttcattaaagcataaaagcaatacatgttttcaaaggaaatgaaattctcatggttaagtttttgaaaaaacaaaattccactgctttaatcgattacacattgaactaaacgattacaagcttctgttttaattccggaaagccatgtagaacattttaatcgattactatgttgttgtaatcgattacatagcaaaaaacaaaaatcatgttttcctgttttaatcgattaccatgaatcgtaatcaattactgaagttcatttttatatgttcttgaatggtataatcgattaccatattttataatcgattacataagtacattctggatttgtgcctatctcctttaatagattaccacaatatataatcgattacacaagcctgttttaaaactaaaaatgtctgtttcaattgatcacaactcggattaatcgactactttgctcgttgaaattttccagaaggagctatgaacattttaatcgattatttgacaatctaatcgattacacatgataatttaattaattgattgatgctttaatcgattacattctgttataaaagtttgttataaatagattgaagacttgtctgaaaacttaacttacagacttcgattttctgagcatacacaagtcttctcaaagttagaaaggattttctgagttagcaaagctcttgtcccactttttaatcttcatggtgttttgaaagatttattgggcaagattttcaaagatattttggagagaaagttctgaatttaatttctgcatttcaactctgattggtaaaccatattcattcatattcattggatcttcaagttgtctctctccattatctcacgttagaaaggaataaatgtttgcataagaagatgcaggattgttaaataatgaagttgtccatgagaaacattaatgggaagaaaattattcagtctaaccttggacaaaacactattacaccaataactgaatttctactaagcatttctaaggtaatcaactttagaattaaagttgtgaaaaatttttaaaagtgatgaagtcgcactacattagaatggaacatctatatgaacttcatctgaaaataataggaatactcacaataaccaagagggtggtgaattggttaaaaccttgatattttaaaacttatacaaatcagagttcaggatctttatcactttcaaaatcaagaaatctttttactcaatcaaatgtctcagccaagaaatcaatagatcaaaacaaaacttgttgaacaatgaatatgaatcaaagaatcaataaccaatgaataagatgagagatagagaaatagaatcaaagacacaagcaatttatattggttcacttcacaactgaagctacatccagtttcttctaatcaacactagattagagttccactattataaaatttttgttcttacaagcttttacaacatatcccctttatcaatcctagataaagaatagaaatctaaaacactattagattctaagagacaaagaaccaaagaacacgactctgttcttcacactggagaacccttctctagatacaggcaagaacccactttacaatagcaaacttacatagaaattcagaaccagaattacacacaaagattaaggagagagacaacctgatggtccaatgaatgaaatgcacatgaattaccaaatcaagatgaatatcaaactagatcagaacatgcttttccttaatcttgaaaagaaacttgctcaagaatcattcaaagacttattgatattttgaatgaagcaagaagtaaaaatactgagaaaatcactttggaattccttagaaggcttatgtgtattcaaaaatacgaatggttaagttataaaataagctaagccttcactcctatttataacagaatttgtaactaattataatcaattaaatgcgcttgataatcgattaattcgcttatgtaatcgattaaaataaccatgtaatcgattaaaccattcaagaatgtttcttggtttcaccaacgagcaaaataatcgattgtcccgagttgtaatcgattaagacagaagtctcaggataacagaatgtaatgtgtaatcgattacaagatttggtaatcgattaaagcagaagtcttatattttcataatgaactgtgtaatcgattacaagctttagtaatcgattaagacaggaaagtgacttttctcaaatagcctatgtaatctattacaatgtgtggtaatcgactatcacaacaaggcttaaaattcatgattaactatgtaatcgattacaacacttaagtaatcgattaaaattattaacaaagttgttttgttgtaaacgaaggccaaataattgattattccggaatgaacgaagaacataataatcgattatattagtaaagtaatcgattaaaccagtgaaaatagcattttttccaaaaacctttcacttagattaaaaccttaaccaaattataaaagctttgttattttatatgaaaaccatttaagtttatgaatgaatgaatgaatgcaaatcatggatcatcaaattagcttgtctcttacacttgcatcaattacaacttcaaggcatccaagcatgttgaaagctcaaaaccaatctttaatcaaatcctttttaatcttcatgatgatccccctatatcctgaaaataaaggaatatttcacaacaaccaagaggggggtgaattggttgaaccttgatattttaaaatcaaatttaaatcagagtttcaggatctttatcactttcaaaaaccaagaaaccttttactcaatcaaatagctcagcccaagaattcaatagatcaaaacagaacttgttgaacaacgaatgtgattcaaagaattaaagatcaatgaataagatgagaataaagatataggaataagaacacaagcaatttatactggttcacttcaaaaacatgaagctacatccagtttcttctaattcacactgaattagagttccactattataaaatattcttacaagcttttacaagaacctctcctttatcaaccctagataaagaacataaatctaaaaccctattagacttctaaggagaaagatccagagaacactactttgatctttaagctagagaacccttctctagtcccaagcaagaagaacccaattacaatagccaattacaacaaaatttgtaaacagaattacaatcaatgagttaaggaaaggaacaacatgatgatccagtgaatgacatgcaaatgaatgaacaattcaggttgaaagacaaaaacaaactcagaacattcttcttccttaacctttgaaagagatttcttgctttaaagaatcactcaaatacccatgaatgttttagttgaagcaagaactcatagaactcagaaaaatcactttggaagtgtttagaaagcttgtgtatgctcagaatacgaattgatcaagttttaaaacaagctgagtcttggttctatttataacaaacttttgtaactgtcagtaatcgatttaacgctccatataatcgattatttaactcatgtaatcgattaaatcaaccttgtaattgattaaagtgttcaataaagtttctgggcatgagccacgagcaagataatcgattattctgtcttgtaatcgattaagacaggaagcttcaaaatatcaaaatgcactatgtaatcgattacgaactttggtaatcgattaaaccaggaagctttaaaaaacagaatgaactatgtaatcaattacaatatgtggtaatcgattaaattagaaaaacatgatttttagtttgaactaaataatcgattacagttcctggtaattgattattccaggaaggcttaaaaatggtttttaactaagtaatcaattacagaaattcactaatcgattataattcataacaaagcagttcagtcttatgcaaaggcaaaataatcgattaaactgataggtaatcgattaaactgtttatgaaggttttccagatttgaatgaagaacaaaataatcgattaactctctttggtaatcgattaaaatagtgaaaaacttaattttccaaaaacctttcaatccaattgaaaccttagttaaatgttaaaagctttgtttgattccaatgaaaaacacttagttaaatcaatgaatgaatgaatgaatgcatggatcaatcagatagctctcattttacataaatttttcaattccaagtcttcaagcatgttaaaagctcaaaaccaatcttgaatcaaagacttccaaacttcatgaagctccacctgtatccaacatcatcaagcataggttcattctagtaaacatcataatgactattctgatggctctttagaatgaccattagaaaggttctccagaatagttcctcagaatgaaatctcataatggttttgataattgtcacaccattacagctagaaagtgatcttgcttgttccagaaggacaacaacagtatggaggccactccaatggtctatttggaagttttttaaatactttttgaaggttgtgaagaacaaagttgaagcactccatttctaaaaaatctttgtgtaagaaatatgtgttctagcttcaaccctctttatgagagtgacctacttttgtattgagctttatgacttgtaataaccttagttagaagtgtgaaaccatattcctgagtggaatccctcttgtgaggagaaaaatctattatctgtgcaataaaatcacagacccattttttgtaaagcccataagtgtctaacaagagtgaaattcattggtgtaactggtctagcagaggttagttttgaagtccagtaaggaactggcatggttgtaaaatccaatggttgctagtctagttgtgaactgattgtgttagtggaaatctcatcttgaggggtgaggactagacttagctcaatgttagggtgaactaggataaaaatatttgtgtcatcttcttctctatctgtttcattttgtttttactcaagtttgaaatctgattttaatcaagaacactaaatatgttatcctgcatcttaaccaacataaaaatcaagttttgattaaaaggtttttattgaatactcatctttgaaacaaaagtgattatctttataaaggaactatttttccataaccgctgcattttcattctaagcaatttgaatttctattttgaacatagaacgtcttttaagctatagcaatttcttttggatcatcaccaaaaatattttcaacatctcaaaggaacataaaaaattttcaaaaccccaattcaaccccccaccctcttagtatttttgtcacttcatagcggacccttattggctaaaaggaggttaaattttctattatattcaaaattgagtttgaaattaggcagtaggacaacgatgttggatcaggtcaagaatctagaaggggagttgaatagattccttcaaaatctttaccaaaatcattcttaataccaattaaaaacaaccctttaaagcaatcaaagtttcctcaatagatctttagaaaatagaaacttttataatgaccctttgaaattgatttcactcccaagatgattacaaaaaacagagttatagagaataagagaatcacacaagagtttataccagttcaatccaatatagatttacatctagtttgttctaagtcctcttaaaatatccacttcatagagaacactaatataaacactatgcacacacaattatataatagaaaaagaaatcgttctcttgaaccctacaagaaaagatctagaattgaaactctatcaattcttcaacatccttggtaactctaaccaagaacaacactctaaaagattaaaagataaggatcaaatacacattaaatgtgtaactcttcgatcttcaatatttcttcacaagttgattaatacacgattgtaaaatgagtgattctttgataaacttcaatctttagactattgcagtgttattcttcttgaagactctcttgaaatttttttcacaaattctaaactaatcaagagtctattaaaaagaaaacacataggggtagttataaattttgatagttaaaacatatctaatcgattataaaaacaggcaatcgattaattcatcaaaatcccctttgttctataattccaaaaactagttaatcgattatcagaaagggtaattgattaattcatttcaatatgagaatatcagtttcttttgtgttgactagataattgattattaagtgtggtaatcaatgatggattcagatagagagcttctctttgtttactggagttgggtaattgattatcaaatgagataatcgattatcctaacatgcagaattttccttcttttgaaactggcttgggaagttgattaccaaatgaggcaattgattaattcaatgttgctagccaaatttcaagagacaaacaaatattcttctactttataactgatcaaacactaagcaagtaaaagataaaaaaaaaactaagtcatacacatgcctagactaaaaaataatcaatacaaatgcctcatcaatcaaaataagttaggcattgtaaaattatcaaaccaaaactaaattaagggcttcatgctcttcaagctttgttctaacaaaaatcttgggaaaccttcccggtgagatttatgagatgttggtaaaagagttttatgccaacacctatgatactgcccaaacaatccaaaatcaaaggaaaggtaatatgataggacgaccttcgcctcaacaacttcctgcacaccccagtcatcatcaagcctgatcaggccaccactcggtacatgcagctcaaagaccaaaagaagaactatgaggcgatcattgcccagctttttattcctcatgttggctttgagacaaggtcaaacaattagcctttgaggatagtacgaaaggacatgactatactcactcaaacttggagtgtcttttccttggagaacttatctctcacatctcattcctttgatatcaacttggagagagttaagctcttgtatgctatataggtgggctttgaaatgaatcttggagcctttatttcagagaagataactttgatggcaaagtccaacatttcctaccttggtttccttgctcttatcgtaacccttttgtaacaccctgaaattttgataactaaaaacatatgtttgatgcatttgttgtgattgtttgattatttgattaatttagattggtttatttgttgtgcattttactcgggtgcaattgcttggtatatatgttaggttgtgcgaaggttgtttgagttgcgctgaaaattgagtgattccgagtttgacccgaaaacatattttagtaaaatcactattatggattggttaacaattggatcaccttcaaagtttagaggtaggtttctaacccacatatgcagagtttgaccgttgggattgtcgaaataacatctgtagagtgatataataattttttcattgaaccataaattttaaaattgggccaactcgctcaagcgaattttagaaggctttttggctcacctgggtgagtcaaggcggttttaaaagcatgcagcagcctccaaatcacgaaaatggcttccttcttcctccaaaacagcacccaacccccttcccctcttcctccacacccacgatcactggtgaccaccactagccatcgccgcttgtcgttagatcatcgcacagagaggaaccctttaatcggagcagaatattcaaaactcaactcaaggattcggtagaggatggagccttcaatccttctttcattgattctttggagataatcttggtttcttttgtcttctcctagctagtttaagcttctcttagtgtctcttgtgttttgggtactgttgttgggagttttatacatcctttgtaaaccctttgaaaatgagatgttgtaaaagtctcctttttttaaaactgatttcattttcttgatccttgttgaaccccaatcacattagtgtaatacgaatttcaaaatgatgacttttgatgtgcactcccaaaacaccattttagcctctgtttaaatttgagtgggtatttgaccctgaatgttaatgttagccttctttttgaaatatatactaaatcatcttcaatttggtatatagagctctacgtttgggccaaagcacgcaaacttgagaaatctctaaacgacgtttcaaggagctaatagagggatatagataggtaaggggagtttattatttggttatagttttggtaccatagttgggggccagggagtccaactatgaggatatctgtctgtccctgttgtgtgctagttttcatgaaaagttatgttttaaactaatgggatgcgatatatctatcattgatgtatgcttgttcctaccgtgtgctcattttttagacaaactgtgtttttaactagtgggatgcaatgaatttgttactaatggataaaattgtgaatgatgatgttgttgtaattgattggatttttgggaaaagtcttaattacaaaggagactctacccaaaattttataatatgttttcctatttaattctttattaaatttttaaatgggcataagagtgtattttctatattgtagtcctcctctttaatttagaattttcctaaaatatcagtctcgtggtagtatgggtggtggatgaatgaggtgatattaatgtcaatgataatattgaaatgagatgttattgatgtgttggtgatgattgaatgagataatgatgatgtgtttgatgatgtataaatgatataatgatgatgtggtttatgatgtttaaatgagatgacgatgaaatgaatgttgatgttgaaatgagatgaagttgatgtttatgaggataatgttgaaataaaatgaatttgatatatatgatgatgatatcgagatgaggtgatgtgtgtgtacactgatactcatggggtgcatgattggtcatccttgcggggaagaatttgttcctggctatgatcattcattgatggttgccatggttgtcattatgtgatttggatatacatggatctcatggagtgtatgactggtctgttggatatagggggagcaacaagaagaataaagcctatgactttgaagaatgttttgagcttttcacatgccttgaagattgtaattcaaatgaagtgtaggagaagacaatcttttgatccttgcattgcatgcacataatcattaacatgcttaaatcttttcaataaaatatcaaagctactcactatttgaaaaaggatttaattgagtaatgtttttggaaaaatataatttcattgttttaatcgattactcagcggattaatcgattatttggttcgtatttgaaattggaaaagctttgatgaacacattaatcgattacacaactcttgtaatcgattacatagtgtaaaatggattttgtgcattgttgtgttaattgattaccattattcgtaatcgattacataagctatttggaaaagcctacttcatgattaccataaaatgtaatcgattacacaagatgtttctgaaataaaacttttctattttaatctattacagctcgggttaatcgattattttgttcgttgtgaaacccagaatgaagccttgaacactttaatcgattaagtgacaatttaatcgattacattagctattttaattgattatttggctcgtgtaatcgattacagattgttacaaaaagttgttataaatagaaagaaggcttggcttgaaacagaacttgaacacttcaaattttctgaatatacacaagccttctaagagtttgaaagtgattttctgggttaactaagctcttgtcccactctttaatcttcatgggtattgaatgatttcttaggcaagagatttcaaagaaatgatggagagcatgttctgaaattctttttctgcatttaactctgattggtaactcatatgcattcataatcgttggatcatcaggttgtttctctccattatctttggttgtaaatttgtttttgtattgtttgttatttgatgctattgtaaaagagttctttgaagcttgggttagagtagtgttctctagggaagaacagagcaatgttctctggttcttgctcactaaaagtctaataggattttagatttctatattttatctagtgttgataaagagagtttgttgtaaagcttgtaagaataggaatttataatagtgaaactctaatctagtgttgattagaagaaactggatgtagcttcttttgagaagtgtaacaccctgtatgcatccggtgtattaacatattacttaatcagatgaacgcatgattactttaattaaaaagccgcggaagcgatttcaaaaccatatttcttgattcattatgtatggtacgtatagacaataaattaaacgaatgacagattaccacaacagccttagtgatccagatgacgtaaaacaacgacagataaaactataatatccatcccgatataccaggaggttataaaccatagatatccacttgcctatacatagattatatgtacattccatcaaaatactctaactgcatccatacaaaaaaagatagtaggcatcagtgccctaatatcacatatcaaatcctcatatgagggtacaccatataaaggaattcaatatatgcaagcatacacacttttccccacaggggtacaaactaacaacacacacacacacacatatatatatatatatatatatgtgtgtgtctgtgtgtgtgtgtgtgtgtctatacacaacagtgagcaaccaagctctcaaaacactgctacaagcagctataccatgtatgtcccctactagggcctctcgccctggggtccctcatccctgtcagctgtacaacctgcaaaatataattcccacacacggggtgagataaaaatctcagtaagctcagggttcttggagcatttccttcaccctagctcacttccatgatcacaatacattaataggcatcacaacatcatcacaacaacacacaggcacacacaagctctaatgtgtaacatcataagtatccaggaccatctcagtacccagtaagtcatcgtggaccatctcagtccacagtgtgaggccggaactcacacctgtgtcatccaacaggagctacccctacacaaggatgcacgccacatggtacctccgagaataggttgctaccacatgagaccacctatctcttggtcttaaggaatctctcctatggagcaaaccaaactaggagttgtgctctactcctagggaggtccgtatctatctacttgccagaagatctatccgaaaggcaaccatacacaaagcacagatacatgcacacatatcatcatgaagaaagttgtaacaaccaattcaatgcatgtaaatcatatatgcacccatcactccatctcagagtatgggggacacacaagtagtgggaaacattcccaagaacgaagagcttacctggcacggtagtgctctgctgtccaatccctggactgtggtctctgccactgacactctcggtgtcccaccctatatacaagcacacaaaatcaatcaacaataacggcttttaactgttcaaaagacaagaagagcagttatctatatcactctaatcccttattactctatatcaagtcttgaaagctagtcacccaactggtgacttacagaccctcaacaggatctatctcggtctaaccaaggctctagagtctctcaaagactctgcataagtcaattcaaccaattctgtaacacctcgtaggcctccggcgtattaccattaataatatcagaatcgcgcttaaaacatttattcataaacaagcggaagcaatcgaccgtatttcttgattacattatgtatggaatataaaatcacacacagaaggaacattaacacacccctgctgatccagttcatcatacataaccacaggcagataatcaatcatataacaaatatactcaggaggaaaacttatatcatatcaacaacagttttgtacatatatacatcagtgttctcaccacacctgtggttatacaaaagaataacttccctcacacgagggtatacaaaactgtacaagtcacgtgtgtacgcacacaccttcccttctcaggggtctaaaacaaaaacaaaacaaaatgagctctctagctctccctgctgccacccagccaagcagatgaagtctctactggggccttctgcccggagactgccctcctctgccagaagagtcacctgaaatcatataaacccccacacggggtgagatacacatctcagtaagctcagggtctctggaggaacctcctccaccctggcccactctccacagtacaaacatcaggcaatcacaacaatttggcccaatggcctagccttccggccctcataacaatatgagcaatcaccttgctctatgtacggcgtatcatcatcaatgcctaacctcagtgtgagaccggaaactcacacccgtgtcatcccattgggagctaccccttacgcatggatgcacgtatatggtacctccgagaataggcttcaaccgcgatgggacacacctatctcttggtcttaggggatcatcaccaccccgggatcatcatcacccatgagcaaaccaactaggaggaatagtcgtctcctagggaggtccatatctatctactggccagaagatctaatcacaggcataatacatttctcaagcatagatgcaacacacatatcattatgaggatgcaacaaccaaatgcatgcaccatgaatgcaaccaacactcccacggagtgcggtggggctcaaacaagcgggaagtactcccagggaccctgctctatggcaaccaccactgacaccctcggtgtcaagccctaaacaaggcatatgtattcatatcaaaaccaatttcagtaattcagcaacatagcacaacagaaatcctctagcttagggttcaacatggcctagcacacactaggcttcttacagacctttctaggtccatcagggttgaattcaaggcaattgagtcaccccagactcaatacaactcacatacataagctcaaactctaatcagcccatagttcaatatttctctggaacggtctaaccctcatcaaaggcaccgttaaactagcctcacaggctcaacacaaacataatcaaggcttttgcatgtccagaaaccaacaagtgactcatcacacaagctacacatgcatacacagagcccagattcaaagttcaccaattcaaattctgaaagctaatccttcatcactaaaccgttctaagcaagtttctctacaggaacctgggctaattctaaccccagctcatatgggtcactattcatagaaaactccaaactacaaattaatcggagaaactcgagtttcttacctcaaaactaatgaggaatgcctctggacctcgcccccaagcctgggtgtccgccaaacgccgctattcctcggctaactcgagttctctcactttcccttagaaaagggacctctctgattaaggggtttcagaaggaattgatgaaggattatagctctctcaaggtttgtcacaggtttaagggcataagaaggtgtctaggtcatgaaataaggccatatgaagcttgggcaagtctccaatggaggttagggacgtggggaagaaaaagaagaggaaatgcccagaatttttgaaaaatggcctatatatactcagcctgaccgacatgcgacgctgatcgtgccaacttccatagcccacggtgccatccgcgcccaactggcgccctcagcaccaaactccagaatgtctggcacctttcgcgccaacccggcactcctggcgccaacttccagagttcacggcgccactcgcgccagacaccagagactgtggcactgatcgcgccagacccgcgctgatggcgccacagctatgcaactggtttttctgcagaaagctgggattctggcgccaaagcctgcgccgctcacgccaggacttagggttgttataaattcaattgtctttatccaagccatatatcaataatatccaacttagctaaaacagttatttcagcacgtattcaccgtttattcagcctcatgaatatcttttgtaaaggcacttaggcccatacatctcataatacccttcatttagtccacattcttcctacgcatacatatctcagagtcaaaaccaaacttcatctaaagtcatgtttcaaagttcattctttatcagaacaacctcctgagcatacttttctaaagaacctaagtctaattccaaccctaacacaaatgggttactattcatcccattaccaatttcacaaatcaatcgataaaacttaagtttcttacctcaaaacagtcgaggaaggctggaagatcacttctccaagccttggcgtccttgaatcgccgtctttctcctcaaaactcaagctttccaaagttccctaaagaaagggatctctccaattgatggttttctctaaggattgaagctggaatctagctcatggaggagttctaaacaactttcctgaaggataggaagtgtttagatgaagtatggaggagatatgaagcttctctggttgttaatggcagaaaaggctcagaggaagaagaaaaccaagttttggccttcaaaacgcgtgaaatggccttttataggaccccagcccgcgttctcacgctaatagcgtcacaccccacgctaatcgcgccactaattcgaaagaaagggattcctggaacattttggcgctaatcgagtcatatctggcgctaatcgcgccatatgttcgaatagggggtctccaggaccattctggcgctaaccgcaccataactggcgctaatcgcgccacatggtcgagtcctgacgctaacggtgccactccccacgctactagcgccgctcccacgctaacggcgccactcccactctgttagcatgagattttattttttttttagacttggattattataagaagtgaaccagtataaattcttgagttgcttttctattccttcatctttatcagttatcttactcattttgttcttggcatcattatcattactcaacaagttatgttttgagctattggtttcttgggctgagtgatttgattgattaaaagtattcttggtttaaaagtggtgaagatcttttaactctgatattataaacaaaattttttttataccaagatcaaaccaattcacccccctcttggttattatgggtattcctattgtttttcatggtcatccttgcggggagggatttgttcctagccacggttagtgcatcagtgagcccatattggtgtgttatgtatgtatatgggtgtatgattggttgaaattgcacgattagagctactaatatcgtggtgacgaggcgggtcgttacaccttttgtgttgacaagggtattatttcttattccaaggtcttctatactcttaattccaccattgataggaagtacatttttaagaatttccttaacaaggtatataccactactcctcctgagccacgacgacattaagctcgtgaccgagcaccttcttctagtgattatttgactatagacatgcttcaggatgagaagcaagagagaactagaagagaggatgccatttatcatggccaaatcttgatcatggaaaagtttgcacaatcttacccacaagcaacatgttatgacccctgagaccttctatgctcgatttgtttggcctagggacaaacctagctcttatggaggaggtgacactgcatttgtaggtacttctgaagctactattggtgttagagaaagcacgactattgaagaaaacattattggaggtgttgaggagattgttgttgaggattttgcatcttaatcttggaggacatggtctttcccaaaattttcacaacttgaattgatctttccctccatgaattcaagcagattgccaagtcctccaagctacttaatgttttctttctagccttcattgagcttcttcctccaacaaatcctccaaatatcatgtttattttgatatgagggacgttttattattactctgggaattttgttagttaataccttagacctttgttagttaataccttagacctttttctctatcttgacttttttttaggtatataatttcattactttaaggaccaattgagagagaacaatactttagggactaaattaagggtttactctaaaagagaataaaaatcaaacataaaaattcatagaaacagaaaaaaaaaaaaaggtataaaaccaaaacaaccctattataagaactacaaagttatttaatcaactttttattttgtcaaaaagtttataactccatttaatctttcttatgttaacctctgttttttttcccttaaaaaaatgttaatctctgttttttcaattcaagtttaaaggttgctttttttatttcagaagaaataaatttcgtatttcatttttcatttttatttatggaataatattatgtatgtagttatattaactcttatgtacaagtcctatttcccaagcccataaatgcaaagctagaaaagggcaaacagaaacgtgccaaacaggaatctgagttaccaccatatcaatgtaaaaacaaagggcatgctccggtaaccaggttgcaaatagaagcatcccaaggaaacacaaaggagcccctcttgaaacttgaatggaatccaatgcttcactttctttccttttcctaaggacagggcactctctactgtctgcaacagaaaatttttgcagtagaaaaagcactatttctgaaacagaaactatccctgttgttagaatctgcaaatgtggctcttgtcatgtgtccataccatacaatgcaatgtgtaatttaggtgtgcagtttcttttgtacactctcgctgctgctagtgcttgccatgtgcacattctctcaaatttacttcttcttgtgccatccaaatttgacttcgacactaccatatttcggcaagaaaaacaagattatgtatttaagagaaaatcagattctgagaagccattcaatgtcttactatacataatagcggatcaattaggattaagattctataaagatttaaaatattctttttttttctcatatttaaaaagttatcttttaaaaatgggtaatgtatataaaagaaaagttatcttctaaataaaaaaatgattaaaagagaaaatcttgttaaaagtaatcaataaatttttttataaaaattaaccattaacaaaattaatatatattttatatctaaaaagtgataaaaaaatataaaaacctttacacttttaatcaataaaaaattactttaaatataaatttttaaaataatttttacaaaatcagccatcttacaatacatatcaatctacacttagacgtaagtttatttaaattaaattttaaaatatatataactagttgacaaatttttgtgatttatctttagcatgaactcttttaattcatgaaacacgtacgagatgaccgttttaaaagacagaccattccttcgtgtcattctttctctggtttagtcagacactcagactcctcacaccacctgattaagtcaatctttcttcactaaaagcaagacaatttacatatattcacatgttatgttttcaactgataagcttgacaaatgaaacaatgctcttcagaaatgaaatagaatacagctctaaaccagttaggtggttcggattaatcatcatgggatacttaattaatttaacattttaaattgattaaaatttcttaaattaaaaaataacacaatttattctgattaaatagttatttaatatatctttaatttaataaatataatttttattatttatgtatgatataattattgatcgaaatcatgaatgatgtggtatttttatacaaactaataatttttggctctaaacatcatcatcaaatcatatgctggatacactttatactatgttcttcggtattattattgtgtccggaagcataaactacatagaggacaactaaaagaacatccatatagcatcaaaccacacgactcatgacatgcatgatgtactagtcctaattaattcagcgtgacaaactaatatacaaatcatttaggtagtttaaatttcaaatccttcaaatagttatgtacagtgcttaattttggtaattttctttatacatttttattgtaaccaaaaaaagaatttacaagaacctcgttcactataatttataactcaattatccaaaaatatctcctagttgaatagaaatatttacaaatagtgaatataaaaggatcaaaatcatcttatgaagataactaatatgaaaattttataatatactgtgagagatataaaactattgagtttaatttatatatactgttagattaatttttttaaaacttttatgtatcatagtaggaaaaaaaagtctacattgtcaattaatcaaaaaattgtattagattatttttaaaataactattataaaaattaatgaaatatccttacatgacacaatctatgattaaatgatagcataaaaaatatcattactatattctctttgaattaaaatatcatcaataaagttacgacttatttattgtacatctataattttacgatgcatcacaaaccctattattatatgtctaaatagaaaaatcttttatattgttaatatattttaattcaattcaataatcactaattaaaaattatttattatatgtatcaacttcatttttgtattttctttttgacatagtattgtgttagactgttagttattaagctgagaaaaatctaaatccaaaatgaaaaagtgcccgaaaccatgaacaccatgcaaaataaacacatcaaaataaagagcaaacatggcgaacacatgaaagaaaagcaaaattgacttaattataataataataataataataataataataataattattattattattattattattattattattattattattattatgcaaagaagcaaaaatgcaagtagccaatcaatccctctatctaattccaggaattctagaattcgaaagccagagaaggaaaaaagaaaaagaggcattacaacttagaaggaggagttggccaaaacaatgaaaaaagaggaaagtgtgggtgggtggggcacgaaatagagggtgctaacagcgactagcgagtgtcccacacacagctcatcagcgtggcccagtcagatattcactttacacataatccaacatggcatggcatggcatagcatagcgttacgcatggcacgttcaccacaaagaagggagcatccaacccttcaattcaaccatgtccttacgcgcgtgccgtgccccccatccatgccagtttttcccaatccagaaaaaggtgggatttcttagccatgtcacataacttagtgcttgtcatgcttcatttttcctttattgtatttgtatcccaccttgcggtaaatgcttcattcttccgtgctcaattaggctacattggatcaaattagtaagaaaagataattgaaatttgaaaagctatttggtagttgaaattttttaagttagtttaataaaatataaatatttgataaaattacttgtgaaaaaatagagtaactaaaaaatgtaaaataatatgaatgaaacatatttaaaaaggaaaataaaaaagttgaataaatattttaaggatgaaaagagaattaaaaataaaaaattaaaagttaaaaattaacgtttaaaaaaatactacaagttattaaaaacgttagaaactacttaaaaaattatttatcaaactattaaacaagttcttttagctaataaaaataaattaaaaactaactgatataacttagtaagcataatcttaatttactatctaacaatctcatattcattattctaaataatttaattaattaatacatattttatatttattctattttcttttattaaatttatttcatatttaaatatctttttagtctttgtaatttaacatttttttatttttgtccttgcaaaattattttttgatttagttcttgcaaattatgttttttattttatttttagtccttaaattaatttagataatgctttgaataatgaaaaaaaaatgttatctaaaatattataagaaaaaaataaattaaacataatttacaaggactataaacaaaaaaaaaattgcaaggacgaaagaaaaactaaattgcaacgattaaagaaatattgaagccttatgatttaatcattccattaaatcttaaattaattgatatatatatatatatattgattcaaattaattaataactaaagcttttatttattaatctcttaataatttcattaaatcttatattaattgatatgataaatatattaattaaaacacaggaaaatatattaattgaaacaagtataatagttattaaaactaatttgataaaattaattgatattaaaatacatttattaaaatttaaactaaataattaatactcttgttcagtcaaaagatacttatgtctttaagacaaatcaagactcctgatttttttattaaatgtaaacaaatacaaatgtttaaagttgtgtcttatgtgttatcatattgcacttcacaaatatgcgtttgaattatcatactatagcaagctaaaatcatgatctatacaatatttactagttggcatttaagacttcatttattattatgtctgagattcgttttgcaaagacattctcttaggatttgttgaatcctttgaagaatacgtgaaacttaagatatgaagtgtcaaacttcatcaaaagatgtgctatattgtgtagacctactctgacaaacatgaagtgactttctattgaagttttcaacaagaaagtcaattagagtgaactctttgtatgaagaaaggacgtatatttaatgcaagcattaaatactccaatggtcattatcatcagacgaagaacaagtgaatatatctactcattgtgagacaacgaacacttgaagatgaagactagaaataccacaagctttgaagaacaacacacaaaccttgtgcacaagcattcattattatttatgtaaaaagttttatgtatattcttgtaatatgtagataagttctcaatacactttgaacatattgagaaaagactaagtgttgattgaaaatttgtctttaagacaatcatagatttagtcatagttgaaacacatacaacaaatctcttttgattaatttagagctagtactaacttgatagggcaaagaacattgggtgttaatcaagcttggggtagaacttgatttgtagagtcaaaagtggtcatgatagaatacttgcaacttgtgagatgttagtggaattagtgatttgccaaaaactgaatgtagtctcagtggtaaagacaaactagtataattccatacgtatgatctttacttgctttctttatgctataactggcctaggtttgaatttatttttagacagttaaaaatctcttttgctttgcgaaattatttcccattgtttgactatgtttttgaaaaattgttatgtgttgcaaagtatttcttctagacaaaaattttgtttgattaagaaaaggctttaaaattttctaaaatcataattctacccttcttcttgtaatattttcatttgcaactcctctgtctataattataaaattcttttaactaattcatgcccttaagaaaagtaattaaattaattaatcacattaaatctatcaattatttatactatcacttcaaaattaatcttttcttatctctttgtccacttaattgtttataattaatgtttggagagaataattaagtaatgtaaggaaaaaaaattaatgatctagaaattagaaaatggtcttacaaaaaaagacaaacaaatttctaaaaaaaatgttttataataaaagaccaagggagtaattaataatatattaaaaatttaaaataatataaaattttaatttaatacaatgcatcaaactagttttatacaaaaattatgtttgagttaatgttctatcaactacattaaatatcctgagaatttttttttttggctcataatagtttttcagaaaaaagattgtctacctctagtaaaaaacacataaagtctaatatatatatatatatatatatatatatatatatatatatatatatgtgtgtgtgtgtgtgtttacatcttaagcaacttggttcttatactttaagagtgcattgaaaatatgaaatgtgttgcaaaaatttttaatatgttttttttaggtaaaatgtaattttccttttcatatttttcaaaatctgtttattttagtccctttattttttaattgagataatttttcatccactttttaaaaattcgcaattttaatctccctattttttaattaaaacatttcatctcccactttaaaaaaatctataattttagtccttgataaattttagacttgttgattgcgtacttttttttcaaaaaatgatgaattaagcttgttaacatttaaataatttttaaaaaaatatttgtcatgtgtataataaataaatgattgtttatataaatcaacatttaaaattgatcataacgactaaaattatgaattttttaaaagtggaaaacaaaatatttcaattaaattatgaaggactaaaattgagaatttttaaaaatgaaggataaaatatctcaattaaaaaatgaaaagactaaaaatacaaattttaaaaaaaagggagacaaaaattatattttagttttttttatattaaacctctcgatctaacgattaagtaaaagcttcaaagtgtagtttctcacataacataggcagaacgtatgcccactaaatgtaacacaaatacactcttggaatgttatctaaacatgcacaaaatcaattttaagtaaaagattctaataattgtagtttctcacaaaacgtacataaaacatatgcctactaaaattaacacaaatacaaacaaaaggacggctatccagtcatgcacaaaattaattttaagtaaaaatattttaattgtagtttctcacgagacatacacaaaacgtacgcccactaaatataactcaaatacaaacacactcttggacaactatccgaaaatgcacaaaatcaatttttagtaaaagcttttaattggagctaatctcacaaaacatatgccttctaaaagtaacgcaaatacaaacactcttaaacagctattcaaacatgcacaatatcaatttaataagacatctcatattatgttacattaaaattttaaaatgtttaaatagtatttttcacaaatttcaatgtaccaaatgaagggaaaaattgttgcttccaaaaataaaaaatacttttaatttctctcaactttaattcaaatatacactaattcttattcaattagtctatctttgcagacagatttttatgccaagttagaataaaatgttgaagatatttaatatatatatatatatatattaaatattaatatgttcacatacaagtctaatagattattgtatggttatatgtgttcatatggactggagcccaatagtctattatattactaggattttttctaagctgtacgtaacactgttgagtattccaaattctgatgctttttggtgtaatatttcaagcacccaacactaaactcttttctctcaaacctccttacctccaacataaaaaatgatttttttaattttgatatgtagaaataactttttattaatttattgaatacaataatatatgtcaattaaattcaaataaatattatagaactaataatacacataatttgttaacaaaataaaaatattttttataattattattctttacataatactactaaattttttacagtcaataaactctaattaaatttaaaatattttttatgcaaattacgacgcattcggtattgagaatagaagacgaaaagatagctagtaactagttagattttgttttgggagtttggaaacaattaatttttttgccataaataaaactattccctgaaaattcttaatgaaaaaattaaagcaaaaacactcttggcacgttacacatgtcaaagctgccccgcttaaaccacaggttctacaaggccaaacacagttaaccaaatgaaattctcaccacgtaagggccacaacctaaaaaaagcaaagtcgtaactggctttaaaaatatttccgttcctactacttgcttttcttaatccacttagatttcaaaattttaagacaatcaagaacaacaatacacaatccacaattggttaaatgtatgaacggataaataatatatgtgccgactaatttagagttttgataagggtaactaatattacccgttaattgtagtaaaaagtattgaatttcaatcacattattagtgaaacgtagatttttttatgaaaaataatatttgtaccatttttttatactctattagcatcaattccgtaacatcaaaacaatcataagtaaacggaaactaaattaagggttagtttgtttatgtttatttttttaataaactaaacaatttttgcttttataagtaatcaattttttatttaaaaaaaagaaaaaaaatatgataaattatgatataaataaaatagtatagagattaaataacatctcttataattaaaaggagtattacaaacctaaagatttgtgccacaaactacacaccccaattgaaatgtgttaaaaaatgtctttgacttaacataaaaaaatatttcagtaacaacatcaaaaacaataatatttttaaatacatatatatatttaaagtaaatatattattataaattaaattaactattttttaattttgataaattaaataacgaaattttatataaaaataaaacggatgtagtattaaattaacataaatctaaacaatacgtagagtggtacaattcaaatccagctgccactgcttggggtaagcaaagcaaacgtaacttcaatttacactggcaagactgagttgtcaaccagtcaaaccattttcttataacttatgatcaaggttgttaaatcgtagagtctacgtagaatcggtgggatgagctaaatcgtaaaaccgtagaaacgtaaatcgtatataagagtctacttcaaggcatgagctaaaactcaaaagcggaaaagcccatttcgaaaatgttatatgacactgcacaaagaaaaaagtggtacagaaagtaacttaggcccaaattagaaaacctagcatatatattcatctttttctctttctctttgccgtttacgattttcttccttctctttgccgtttggtgcagcactgcagccacattattcagctacgtcttctggtttattcttcatttttctccttctccttgccatgcaaatatttggttggcttgttcccgtgctcaatccttcaagctgatgcgccaccatgcacatagataaggcccttatctatgaagctaaagacaggagaatggagatggagtgcgaccgccgcgacgtgagggagaagacgagaagctcgagaatggcctgaatcactgagaaggagctcgtcggcgtcgcggaagaagaaccagaagagaagtttttcttttttttttatacccactgagtcaactcggcgagtcaaccgagttgactcgcgagttcaccgagtttactcctaaatccgagtttgctaccgagtcaactcggtttagggggctgaatcgttgactcgaacgattctaccgagtcaactcggcggtttcacaacattgcttatgatagcaatttaccaatttaacacagtactgtagttagttacactaacacctgtcattaagccagagtgtcaaatactctaagaaagggtcgccacagtagaagtgtagaacatttaaaatgtgaatatattcacaaaatccatatgataaagagcatcattaaatgcaatttttccatttccattattagttcatagtaattggggtgtacagacggtaacatcagagtacaataataacttcatcccaaatgattacattctgattcaattatagggaaaaaaaggccgattcaataataacttttcaattttttactattttttatacaaaaccacataaaaaagttgggaaaaaaattacccatcccaccgcttttgcctttcccaagtcatcgaagagaacaaaagttactgttatcactgccatcttctaatgctcctaccgccatcaataactttatccatataccccaaatgttattttcttattttctaccaataaacccaaagaaaaaaccctagacttccattttttcttttcaacaaaccaaacaaaatccctatttcttaatttctttaattccttctacccctatcatattgctattcccctgtagaatataaaaaactgaaaactattacccatttccccaacccaaaattctttttttaaaaactatcacccatttccccaaaccaaaaaacaaaaaaaaaaaagactaactagtagtaatgactactttttgatccttcatgattcattcatttcaataagtccattcctgaggcaactggatctcattgttcaccacttgtggctgctgcagcttcatgttgttacgcttctgatgacgagaataaccataatgattattattattgcatttgttactcctaaccctcgaaaccgtcgatgctgcacatgaccaacaaataagaatttcacatacccataagaacttgccccctcacaccagtaataattataaaaaattaacaaataaagcacaaaattataaataaaaacccacaagaaaaatgcaaaatctactttaccattctccccaatgaaacgaggtttgtgctgctgcttgtagcttccacccaccacaccgtccagattcagattcaacgcctgcgccactctatcaggaaccaacatagtaatgcaccctgcaaacccgaagaaaaaaaacctaagtcagtaatttcaattaataaaagtaaaaaaatattaattaattaaaccattattaaataataatgttaattaaattgataagaatgcttacctggcttcttgcgagaatcattattattgcgagtatcaacacagcgaggcaagaacacgccagttccggtgctttttcctattctaccagcgagaaaaacagccctcatgccagacccatgaggaggaacccatgcagaaccagacaaacccaacccattaacaacgttcccaaccgtaacaacgttgttgttccttcctctgttgggagggaccatttgtctatgttgttgttgttgcttcatcatcatctcaaactacaaaaaaccaaaaaataaataattaaaattgagcaccaattaaaaattaaaaattaaattaaaagctgtcaattgttttcacttttcacttacttgagcaatctgtaactgctggtgagaaagcgacggttgttgttgatgctgctgctgttgagggtaaaatcccaacccaacgccgttagcgctattaacggcgttgggttgttgaacagtagcagcaacgggagagggtgtcaaaaagttgtgaccgtaacggttacagctttcgtcgcaaatcctctcgacttctcctgcggcggcgcgcaggagatcccacgtggacgaagagttcacgtggggtggaacggcgccgtttggactcgaccctttgccgctgctcccaaacacgctcagggttgactgaggagaaccaccaccaccaccatccccaaacgcgccctaagcaaacaaacaaaacaccatgagtattaaataaagctctgtctggctatttagtatttattaagaagaagacaaagtgctgagtttttcttttctggttaccttgggttgtgcagagttgttgttgttgagatcgagttcgagagcgacgcggcgagtcaaatcggcgaggtggtcctcctcgtcgctctccgtctcgctggaggaagagctgaagaatagagacctcgaaacggcgtagttttgggcagtgaggttgttgcaaaacgatgtgtcgtcgtcttcttcgtcggtgaggaactgaggagggagccaaaactcgccgtctagcaagttgtcagccatggaaataacaagacacaaacaaacgaaatttgaatttgaatttcagaagaatttgagagagtaaatggagtgagtgaaaactgaaaagaaaaagagagggaaagaaagaaagcgagaaagagaatggatctgtgagaaagagagggtttgtaatcgaacagaggcatcccctttaagtacactctatcccgaaaacacagtgaacggtttacgtgtttttttttttataattattaattaaatataaaaatttaataattaaattttggggtgtgattgtgggatagaaactagagagagagaaggaaggattgtggtattgtggagagagaaaagaggcggtgcttttgctttcacgcgcggtgatttggcggtgtgatacacgcgccgtatgcatttctgtaattgtttgttttaggatggttatttagccgtattgtttggcatggcagcactaaacacgtgagagagggaaatttggattcttagaaggaatatttgtcgtaagaccattatttgagaaaggaagaaaaagaaagaaaaaaaagtgaataaaggttatttaatatgacaaagagcaaatatttaattagaatttaatctttttgaaaatgtaaatgcaggttgtaagtagaattttttgaaaaaataaatacttcaatttgtaatatggaaaataatttgattttttaaagtaaaaaatagtgtttaaaaggtaaaataaaagaaaaacggatttaatttgaatatattaactttaacgttttttacataattatttaataggagaattctaaattttcctacaatattctcatagtatgaggatttacaggaagatatgaaaaaatttggagaaagaaagacacaaaattattcattcaataattttgatgatcatatttttacttttataataatttctttcaaatttgaatccaagatgattacaaattatccaatgaatgtaacgaatgtaactcaattaacatcacacattaaatttgtaaaatatcatttatgtttgattcctacaaaatatactcttaagaatggacaataattagttttatagctggtatgaagtttgtgagggatactttggagtcttatcaggaagtgaaaaatcttaattacgataattatataattttaattaatatacaatgtaaccatctatatattaactatttacctaaattaaattaaagagttataattgttgatgaaaaaaaaaattgtatatagttgtctacatgtgttttttgatttttaataataattataatttttattgtattattaaaaaattaaatttaataggcatatattgtctgtttaaaagtttttatgatgccaacaaatcaaaatatatctttcatatgatttttaaaatattataaaaattaacaaatttattatacatgatagatagtttgtgatttaatgattaggtaaaaaattatcaatgcgtatattattttctcaaaatattattggttattatttaatggaaataacaaattatttttatcaattaatgatttccattttaaaattggttatctttttaatttgatattattttgctaaaaatgaaatagagaaatgtccttacgagtgttttaacactatctttgtttaagtttcttaatgtcagaatacatgaattaaaaattatgccttatattttctgtttgtgccaaaattatttataaattattgatataatattcatcattctgatttatcattttagcacttcagctattattatttattttattaataaatatgtaattaaaaaataaaactaatattatcttaaaaaagtataatttgcatttgaatgttaactttttattatttacagaacgtgatgccttctgttttatagtaatgtaatctcgaagaatagttcaatatttattagatacttgtatgtaaaaaaaaaaaaaatcatgattttttaagcattttaaagagttcaaataattgtaattgttgatcaagattaaaattaagtttattttatgatctgtaaaaagtttgtcaccaatatttaataaccctcattactgttcaccaaataaaaaccctcattactaatgctaataaagtttaattttagcattaatgtaaattgtgatgagtgaaaatttgttttagatgtttaatgatagtaaagcttaccaacattatttggtatgaatactaaactcaaattatttgaatatagtcatgattcaagttttataaaagaaaacaatgttattcaaaaaagaaaatttactagagatgatttatcaaatcctatggtagagattaatcattgataaaatcaataaatacttcacactaacatgataataaaaaaagttaatgaaattttatctcattgagtttgttatttatgataatacacacattttaagaaaataattaattatatttattttcatgataaaaaataatcttatctaactaaatattttccataaatgattcattacacttttatagttcttattatttacttactatctattaatggggatggcaaaacaaatttgtctatgaacacccataagtaaatttcattatgatttaaaaattgataattaaataaatacttgtctattaacatagaaaagatgatgttgactaaagattctttttagttcatcttggataaggtcagcctgagattaagtaactagaaggctaataatttgtcttttgtaggtcatctcactcttgcaaaatcaattatttaggcccttccaaattatgctatgcaaacttccttcatcacccactcagtgtgtgatgagattgataaaaaaaaatgaaggaactttgtgtgtttggggaggggggggaagggaacattgatcacaatgagaaggtgcactttgtcagcctaagttgagcggtgatctaggtctcaggggggtctagagatgttggtcatgcactcctaatgaaggttgggaatgggaagacaaccagattctgggatgatgcctggttcctaatatgggtaggctttgggagcataacattactgaggttagtccttatcttggccttcatgtgtgtatgcatgtggacgatagggtttagtgggatcatactcatatttctaactggtttcctagactgactattgagttaattgataaaatcaaacctcctctaggcttcaatgttgaggatgaagttgtttagtccttgtccggtgacaaaccattctcgaccaagcatgtgtatgaaaatatacataagcaagtaccacccccttttggtggtaattttaaacttgtttggtcttagctaagaccagaacaaattcaaattcttttatggagaattttaagggagatttttcctacaaatgaccccagggttagaaggcatatgacattggatgcttcttggccgttatgtggaagtaggagtggaaatgggtcaggccgcctattagaggcttttggctatacctatttaagccctggcctggcctaacttttttattataaaggtcaacttaagactttttgaaaagtctgtttaaataaaaatgtcaagctcaagcttaaaaaaaaacctattaggcctatcaggctggcctatttaatatatatatataaacttaaaaataatatatttattttttaaaaaaatatttttccttattatgaaggtggatgatcaatcactccaaaaaatcaccttgaaaatctcataaaatgattattaattatttggaaatataaataagatgttgagacattttctgtttaaaaattgtttctttaactttcctaaattgatttaaagtgtttgataaattaaatttcctattaaaaataggctttttaatagacttataagtcaaactagacttttaaataggtcagatcaagcctaaaaaaagcctatgacagataaataggtcaggtcaagttttatgtttttaaatcaggccaaggccaggcctaaccaagcttggcctggcctgacctgtttccacccctatgtggaagtggtcatgaatttattgctcgtgctcttcgtgattgctctaatgtaaaggaggtgtggagatttgtctagggtcattctcggttccctcattcttggagcttggatgtcctaatgtgggtggctacaaatttaaagattgatagagttgttcatggttttcgttggagccaacatttcggagcttgtttggataggatctggtggcgtcataagaatttgatctttaatagcattattgtttcgaattttaagacttggcataagacttatgcattaacttgagatatgtagaaggcgtcagacatgtaggtggtgttgaggaatatcaatcatattgaatgtgtggtgagggttcaatattggactcccctacaaatggttacataaagctcagttgtgatggtgtcgtgaagagcttcaattctagagctacctgtagtggggtgatttgggatgagtagggtccttccttgattattttgccatatctctctcagtttgtttagttgatattgttgaagcttgactattgttcatgagctcaggcattctcagattcatggtttctccaagctcatggtggaatcagatttgtaggtggcaatggaccttgttaatagggtttgtggtcatgaccatccttgttttaagctagtggaggaggttcattggatgcttagcgatttggaagcttatactttgtctcatgtggatagggatgctaacaaagttgcaaatgtttttgctcattatgttgtgagtagttagtgtgaagatgttttgttttctttcacatctatttggttctctgcttatgattcgtttttgctcgatgtaaacaatttatttaccctagtttggctccttccccatgtaattgacgaattgtcacaccatgggaatttcaacattatcactctcaccgagatgacactgctagtaatgcgttaggatgttccaacattgaaaggatactttgactcatggaatcatcatgagcttaaaggagattttaaatcattgcatccttaaggttagagccatatgctaacttatttatgaattctctagttatgttcacaaacaatatgaacattgtttattttcaaagtcccttggagattcctatcccatagggactaggttctcctaacattttcgtaacacatacgcatatcatgttatattgcattcacatatactcataggcatcgtgcattcaattgtaatatcaaacatagacatgtttactcattcacatagcaatttcacagtatcaattcattcacacattataagtataaacatcatgtagcatatcatcattcattaagatatccatagcacatagccacacttctatatacactactacaaccttcataaagtgtgaaacaatatcttgcaccgatcctatcaagttaatcctcatcttgttaaagagataagacaattatctacagcttctatgttgccttaggatctaattctatcgtgtactacatctaaaactgagaataacattaaattattttcaaatctaataacttgacttttgcccaccaattggattatattttaagttatagatcttattttaggtgattccaaagctattagttagttaacatttggatttacatttcacatgaagactactaagcctaattcaattcattgagccctttactagaaggattcctcattcattaaagtttctaaataagatggatcacacccgtgatctatggctcatgtttgtgagtaatgacaaattcatatttcgaataatataaatagaatgagtcaagatcatgatccatggatcacacttatgaatgatgacaaacttatgtttcaaatttgttagacataataggtcatatatatgatccatggctcaaacccatgatgcccaacatacatggaattacaaactcttcctttttaatctgaaaaaaatgggtccaaaatgtccaaaatactctgcctaaagatcataggatacatcagcaacaaaagccctaactcatgcaaactcatccaatttccaattcaatggcacaaaaaggaaagaacctcataacttccaaatactcaattcaatgatctaaaataaaaaattaaaagagcttcaaagtgttcatgacccttcaaagatcaatgaaaggaaaaacatataattagttcggattcaagtgcaatttctttatccatcctacaataagagatgtctcactccttttaccttgaaaaggtgtatttcctaagcaaggtgcaagtgagtaacgacgacgatcctcacaatctccactcactcattcgtttgaggttcctatagtacacctctcacaagatgcacaaaagaaagataggaagaggaaaatgttaggtttctaagaatgtgactttccttaaaaccaagttgggctcaccccgactaggtctaacacgactcttcttaaaacttgaggtccttttacaacacatttgtaaaagccatttttttatttgccaaagcccaaacacatatttttaagtcaaaaaatatttgtcttaaaatgaatcaaaacccttaattattttgattagattaaaatagatacaaatgttaaaagttgtgtcttatgcgatatcagatcatgtttcatgaatctacatttgagattataaattcgtctataagacaattaagaattagtcagtgagtcaaacaaataacaaatcttttgatttggtttagaaccaatagtgacttggtaggacaaagaatactggattattcaagcttggtgtaaagcttgttttataagagccaaaactgactgacgaatacttgtatctttgataaaatagtaaaatttggtggcttactaagaactagaaatagtcttggtggttgaaacaaactaatataaatttatgtgtctcatagccttcttactctctttgcttttaatctgacccagggtttaaatttgattttgttttgaaaataatgtctgtttgcaaaatttgattctatcatcttattccatgtgttgcaaaaatttattatttgtttttcaaagttattttagacaataactttttgtttgtgaaaaagatttaaaaaattcttaaaattataattcaacctctattcttataatatttgtctttacacatatatactcccaaataatttatttaataaaaaaatgattttcagggtgttagataatagctagccaacaattttattatgagaatggttaataataagctttttaacacaattttttcattactttttataaatatctcaattagacattttaatattatttttttcacctctatttttatatacttgattttcttaatcgtctattctttttaaaatatcctcttttatatttatctctaaattaaaattcaataatctataatttataatattatatattatatattataacaataataaagaggatattcatatttggtctccacttttgtttagatttttagtttttaccattcaactattgtataccacttcactattttatgtcaatatccaacgtgagttaaaatcataccaactatatatacaactaaatctaatttcaaagtatattattcgtgttagtctttccattatttttttaatatcattatcaatagttaaataattatacataatatattaaattatttattataattttaaaatataaattatatatattaaaaaatactagtatttatttattaaaaattttaattatgcatcatcacaacaaggatagagaaccatcattgtttgagtgctgggggaggttagaaggacgttaggatagaataacactcatattgaggtggcttactactaaaatgttttgatttatatatttaaaagtattaatttattactactataaattttaattatataaaataaattattttatataatatcaaaagtaataaattatctacaatgacttcattattgtatgaaatcttaactatttaataaattttataaatatggtatatatttattataaaaaaacgtaaaaaataaatggtgagatcatgatacttgatcatgtgaagtttttatttttaacagagaatatagattctcattcatagtttaaaatattagtttattaaaaaataaaaaacataatgcgacctgttaaatacagtattatattaaaataagagtttgatgtttgagtattagtgtaattttttttatacattttacactgtcattcatgcataatatttaatcaactttgagctagacttttttttttttttatgaaaaatgggttgaatgaaataaatgaatcttctcaatccattttccaatatttttacttgatcgtttcttgtttttaaaatactaacaatgattttggggatccaataactcaatcaagtgagaaaggacccaatggattcacaaagatttggatttggaaggtgtgaaacacacttgtggtgaggtgtgaagtgtgaaggtgagtgtcacgaaaacttcgaaaacgtgtgactcggcaccacgacgtgactgagtgagcgagtggctccctctcactcattcctcgtttcgtttgcatagggattgaaccattgagcacgcagcaaagcactcttctcttggtggggcccaaccaaaaagcaacaaatatatatatatatatatatatatatatatatgatttaaatatgaatttaatcatataatttagtgttttttcaaatttagtatttttattattattagttcacgtaaatttacacttttatttagttccagtaattttcttattttttatctttaataaatcgtgctttagggggttaaaattgaaataatataaatttgtaagagttaaaattaaaaatcacttaaataaataaaaaataaaaaataaaaacttataaaatttaaatatatgatttattgaatgattaaaaaaagacaaaatgtcgtaaatttaataatataaattaacaaataaataattaatatttgtgtcgataatttctttttaaaaaaactaaaaatgttttttttttgcagaattagaataaaaaagtaccagctcaaaaagaataaattttaaaatcaagcatattttatttgttgaaaattatgggtggtatttttcatcaaaaaggtttttcgattggggattctgattttgtccatgagatgtccacctggcagtgggcccttgttccatttgcatgcgattttctttttttttttttttttttacataaagcatcttttttcccgttttcttcatcttctccactaagcatcctttgcttgcaagtttttagttttcacattacattatccgagtttctccttttgactattttgtctttttcatgttgtagcttaatgcctaaaatagcttggtcgaagggacaaagttttgcctttttaagtgtttgtgatattgtttattaattaaaaatacggaaaaaataatatttacagaacaaattatatgaaataatcagaatattaatactttatttcaattagaaatgaaataaaaaataaaaagtaagaatattaaaataaaaatataatagtaaaacaaatattatttagatgaataaaataaaaagaaaagaaatgaaagattattttttctttttaaaatgagtaaaataaagaaataaattgcgtggaaaatattcttatactaattaaaaataaaatttaataacaattaattatttatttcattatttttagttttttttataaaatttatttaatctttttttacataatcttttaagaaactaaaatgaaaagaaaaaaaaataaaagagagaactcccccctcctcccccggccttcatgccaatttaggtggaatatttttctctcacaaataatgaaaatttgttatatataatggaattacgtatcgtagaatttatggaatagaacaagtaggcactgtacattttaccttaatcgtctgaatattcaagtgatgatttcatttccaattaaagatttgtggagtcaatcatctgcctcatcctcatcatattagtctctagtttctctaccctcatgagttccccatatatcaaactactttcctcaccatacatagggtgacggactcaaaatagtgattaaataaaaaatagaataaattatatttgtatttcacatatatttttttaaattatatttaatacctctttttcttttacattatttttacatctttctattaacacagttaattaacgtcagttaaaatatttaaacaaacaaaattatccattagaataaattatatttgcaccccttgtgtttttctcaaattacactcaatattcatcccttaaatctgactctaacagaatcatcaagactgttgacgtcactagcctcgatgatactagtgtacaaggaaccagacgcagcggtgatagtgaccaaagttacaaccaggaggtgatggaggtgaatgtggcggtgatgacgacgactacggtgatggcagtggctatggtggtggttgctctaatgggaatgagtgcgctaggacgccgtgttggtaggcaaggatgattatgaagaggaagagatgatgctatcgtgagagagggaggagaaggagaaagaggtggtggtggtaagtgaagagaaactgttgaagaagaagatgatttctaaaactcaagatgtgattttgaggaacaagatgaagatattttagatataaattttcattagaagtcatgtgaacaacatgtacttactttctattaaattattaaatggtgtttaggagaaagaatctgggtgtaatgtgaactaaacaattaaataaatttttgtaggatgcaaaaaatgaggaatatcaaatactatttagaaaaaacacatggtatttgtacccttttgtgcatctataaaaaattataactagttaaataattatgtaatgtgtaatatattgtgatgtattttaattatattttattatctttatgtatgcatgtgcataacatagttattgttcacattagagaatgccattgcctatggaggagatcctaaggtagtgagtctcaaaagaaatctctcataagttgttgtccaatgatactcgggagctagtttatccacttcttagaattttgtagtcggttgtccatggctttttactctcaaggttggaatggacgacaagattaattgttttaaagcatatttggtggctaagggttatactaagatctttgggcagtgttatgttggcatattaaatactgcagaagcctataaaccgcttgtggtttgggatgtaactgatcatcatagttttatgtgtttacctcttgtaactttcaacttggttgattggctctttgttcctagcaaatcttccaaattatctcttgagggggaataagtagggtgtgtggtcacctctatgttttctaggttttctgtcttttttgttaatgacctaagtatgagtatttatattagtctttgagctcttctaatagtctcagcccaattgggctcaactaaagagcataggcccaacaatcttccacttgctcttttgagtacaaacttaggtctatagaactcaagaccatgtaactcataagtcatcattaactgaaacacctcatcgcttgtctcaagctagctgggggattcaccagctgttattaatcaagcctcctgataatcaacaaatgattatctaattaggtgttactccactaaaagcccgaacttgaactccaagattaataacacatataacatgtatatgcatcacccctttgtagaatgtctataattgattgacaagttttctgttacccaatctattatttattcccttgactatgataatttctctaatggattacatacactggccagtgtcttcaatatccaagtattgaaacatatcaaggggacattttctacaaatttcatattgtttatctcataaataccgataattaaataatctaactcccaaaataccgagttattaaccatcaatagatcgcacctcacgcgttggtaaatcaaagaatgaaaactatttgattacctatttataataaactcagaaattaagagcaatcttataactatagttatctggagatttgataccttatgacagaaaaacacccttaatcaaatctctccttgatcatttcaatgtgaatattaattcacaccaatattttacaatgattcagacaaaaccatttcataaaatattgcagcctaaataaagtgtccaactttatctaacagctgtgaatatgttcatcaattatgagaacctataatcatgtcctccatgaacgtatccatatgatcatatacttcacaattgatttggaccttggagtttgcaaatagtgtgcaaaataaatgaataattcctcatttaaaactttcggaaaagattacaatgtcataatgtcttgcaaaaaaggaataaaataacaaagtaaaaatcaagctccgaaagctacaacaaatccagaatcctcctaagactcatagatgtaacatgcctctcgaacacacgttcaggcaaactctttgtaaaagggtcagtaaggttttcttctgatgctatcttggttactactgtgtctcctctttcaatgatgtctcggatcaagtggcactttctctctatgtgtttttgccttttgtgacaccgtggttccttggattgtgctactgccccactgttatcacaataaagtgtgatgggacggctagcacctggtatcacccgaagatccataaaggacttcttcaaccatgcagcttcctttgcagcttttgatgctgcaacatactcagcctctattgtagagtcagccacacatgactgtctgatacttctctaacagatggccccactattatgagtgaacacatagcttgaagttgattttcttgagtcaatgtctccttggaaatctgagtctgtgtaaccaatggtttcaagactcccacttgaatagaccaacatataatctctcattctccgaagatacttaagtatatttttaactgttatccagtgttcttctccaggattagattggtaccggcttactactcccactacatagtagatactggtctggtgcacaacatagcatacataaggctacctactgctgaatcgtaaggtatcctactcgtccattctctctacttaagagttttaggagaatgctccttagatagatgaattccatgcctgaagggtaaaattccccccttgaaattctccatgctgaacttggcaagtatttgtcgatgtaatgcaacaattaagttaatacactcagcatatatttaggccattgtagttcaaacattctttgttttttaataggtacgttatattttttagttataatgccatgctaatttgttatgtaagcatattacattaaataacaaaatagaaatcaaattagagaaaaacttaattttatataacaaatatttatgcaatgagagtgtaaagattattttatactactattaatcacaaaatgtcacatgtttaaatttttttaatttcatcctaaccactttaaaattcacacattttatgaactataattaattaacaatgtaaaaaaaaaagttacattaataatgcataacagttaaactcataagactatgcattaattgaataaaataatttcacactattatctaacaaaaactaaatttattaattttaataaaattattttaataaaagttatattaagggtagtttctatttgaatgataatataaaatttcagattgtgaatacatcactattaaattctaaaaaataaacttgagaaatgtaatacaattataattataatttagacaattaaaattacacaatcactagacattaaaaatgcaatcaagtctaaataaaattatttcatgttgtaaacgtgaaatttcaaagtaggggtggactgtagttgactgggctacggtagtatcactgctatttaaaccagcggatattctatatggtggaatattggttggttgagttttttctttgcatagccttctttgatttggtatatattctcacctcacatttttaacttgcaaattctctaacaaaatcacgtgcagttatacaaccagaaagaaaagcctaaaacaaccataatgatgatttgattatacaaacaattcactaatttttttgcccaatgtcttctagaacgtgtttattgagcttccatgagtaaatcaaattctcttatggcttgaccttggtggagctaagagtgttgtatgttaactctgctcttacttttcggataccatgggagagttagattttttttcatatatatatatatatatatattatatatatatatatatttcttttgagtgtataaccttcacaatataaaattacaattctggacatatttttttcaattgtttctctttctcttattttaagagagaaaaacactttttgatcttgggttaaaggacactcgtgttctctaattcattggatcaaagactaatcacgttcatgattctcttattttaagagagaaaaacactttttgatcttgggttaaaggacactcgtgttctctaattcattggatcaaagactaatcatgttcacgatgtgtaactgtcacttacacaagaaaattttgcatatagtaaaaatcaaatatggattctcctgctatatagatagttctccctcatgtaaacataaaagaatttttattaactcaaaaaattatttgtgtcttaagatgaattagaacccgtgaagatgaagacctacaaatgatttcatgtagtgctcaatacaaaagctaacaagaattattttccagtatgaagaaagacttacatttaatacaattattaaataatctaatgactacaagcttcggacccaatttcaagagaatattatatccgtttagagaaacaaacacttgaagatgaagacctataaataccataagctttgaaaaattgggttgcaaacattcatattcttgtatatatatatatatatatatatatttttttttgtatattcttgtaaagttcataactctcaaaacaccttaaacatcttgaaagaaaaaaaattaaatacttaaattgtatatctctgtgttaaagaattcagaactagccagtgaacaaatcaacaataaaacttttaagacttaattatacaattgatctcttaattatattttagggtttaatttagtttctcaattaataaaaaggtttaatttgatcctttaattattaaaattgaaacaattttactttttttcttttatcatatctattaattatttaacaaaaatcgttatttttatgtcaattgtcaacatgattaatataaaacattatatttttaaattaattacttgacaattgatataaaaggacaaaaacaggaaagaaaatattaaatgcttataataatgatagctagcaaagttacgcatgcttttgtttcctttaagcaatgaaagccattatttttttggattagttaatgaggtggtttttacttaattcaataacattaaaatatgtttttaattcttaataaatatttaaattttttgtttattttttataaattttttctttacattatatttttaataaaatattaatttcattttttattattgaaaattttttaaaaaaattgataaatttacgaattttgtatttactcttatttttatttttagtttttttcaaatgaattaataacaactaatttttttaatatagaataaatacaaaattcattaactatcaagaatttttttaaaaatgtcaataactaaaaataattttttattattttattaaaataaatacaatttaaatatttattaaaaattatacacatattttaatcattttataattgtgacttgtgaggataatttcgaaagtaacgtggtggtggcgcactggcgctggcaagtgggagaggcgcgaaagatcctatgctgacgtggcgtcatgatctgtttctagcttctcatcagatcctctaagtctctttgtctaaacgttgtcgttttagtgaacatcatttccgcgcatttgttgtttcaatttttttttcctccaattgccggcatttggacggtgtttttaccgtatttctctctcaagttttatgatagttaaacaaaacataaaattatcacagaaaataataaaagaattcatcacactgctaattatgtttattgaaaaaattataaaacttttatccagtatagtttaaaatcagtatatttctagtcttttataatataaatgttataccaaaattataattacttttttttctttcaattagacaagaataacaaatatagttctcataaattatatattattattattattattatcattgagtgtacaaataaatagataagagattatttcaatttaatcaataatttttagttcaagtcttgaatttatacttatgttaaatacaagtaagagaattttatcacccctgattgctctagatctatatccagcttaaaaaaaggagtaattgatttacattttttaaaaactattttttggtttttaaaatttaaaaaaaaacttgtttgattggtgaaataagttttttagctaggttaaaatggaaataggtaggttttcagcatatctatgtcaatccatgagccaagcttttttctacttttttttttatcgtgtttattaatccgaaaacaaaatttcacagaaggttattactaactcaaagttagtacttattttaacccatatgttgtcgttgagaagtcaaaagggaaacatcattcagttgttgctttttttttttttagtttttaaaaacattctcttaaaaacaacttttaaaatttaatagacttgaaatgataaattgattgataattgataatgcgaaaaattacactttttatttaaaagcttattggtataattcaggtagttagtttgttagaatctatccaaatcaagtgggaccttgagttgtatatatgctttgttttatcaatgaattacatatagaatacattcagttttttgtgtgatatctcagtgtgtatatttctaaagagtgtgtgtgtgaaacaccaaagtgcatacataagtgtgtgagtatcatagtgagtgtaaaacagagtgtatgtgcattcttgcactatcagtggtatcaagagttttgttctagatcctggttcttgagagaaagcatggcatcctcaaatggaaatgttcctatgaattttccaatcttgacatcaaaaaattatgatagatggagctcgcagatgaaagtgctctttcggtttcaaaaagtttggaagcggtgaatgaaggagtcaaggagctttggaggcagccaacagatgagcagaaagttgctcatcaagaaagcttaaagaaagatgtcaagactctcttcttgatacaacaatggatggattttgacaattgggagaagatctcaacagcagaaactatgaaagatgcatgggatagcttggttcggttctttgggggttctgacaaattaaaaaaggtggaattgcagaccctaagaaggctgtatgaattactgtagatgactgatcaagaaagtgtaagtgatttctttactagattgataactctcacaaatcaaatgaaatcttgtggtgagacactttcaactgcaacaataattgaaaaggtgttgagaacactaactagtaaatttgatcaagtagttgttgtattggaagaatcaaaagatcttgaatcaatgaaaattgaagagtagcaagtaacccttgaagcccgagagctgagactaaatgagagaagttctgtgaagactgagcaagctttacaagctcagttcaaacataaaggaaaatggaagaataacaagtagaagaaccaagaaagaggccaaggtagcaattctgagcagaaccaaaatattggaggctccaagaaacatgaagggagcataaacaatgagaaggattccaaggaaagatgtgtagtgttacaactgccaaaaatatgaccattatgcaaaagagtgtagaggcaagacaatgccaagaaagtaagaagaagaatcacaaatgactcatgaggaagactctgaatcagatgaagttctattgatggctactacaaactcagaagatgacaaatctaatttgtggtatcttgatataaggtgtttaaatcatatgtttggtcatcgagaatggttcacaaaccttgatgaaagtgtaaagaataaggtcaaatttgctgacaacatcactgtgactgctgagggattggggagagtgatgatccaatagaagaatgactagcaggccgccataactgaagttctctatgtcccaagcatgaagactaacttgctgagtcttgatcaattactggagaaaggctacttaatggagatgaagcacaacctttcaaaggtgtttgatagtaaagggagactaatcttgaaagcttatctgtcaaaaaatagaactttcaagattggtgttcaagttatgcagcaccattgtctggctagtgagtgcagcagtagtgaaacttggttgtggcatcaaaggcttggacatttgaattttagaagtttaagtctattgaagagcaagaatatggtcaaaggtcttccttcaattgtgcaaccaaatgaagtatgttctgactgctatgagtccaagcaaaccagaaagtccttcaagtcagaaatttccatcaggacaactgaaaagctagcagcaattacctcagatgtatgtggaccttttgaggtaaattctcttggtggaaatagctactttgtttcctttactaatgagtttacaaggaagatgtggttgtatctcattaaaagaaaaagtgaagtgcttaatgtttttcaaaagttcaaattgatggttgaaaaacaaagtggaaagcaaatcaaagtactgagaactgatggaggtggtgagtatgtctcacatgaatttcagaaattttgtgatcaagaaagaatcatacatgaggtgatagctccatatacacctcggcataatggaacagcagaaagaagaaatggaactcttcttagcatgacaagaagcatgctaaaaacaaagaagatgtatgcctatttctggggtgaagcagtggctactgcagcttatatcttggatagaagtccaaccaagaggctgcagggtatgactctagagaaagcatggtcaggtaaaaggcctagtgtcagtcattttagaatttttggctcattatgctataggcatgtacctgaacaacttagaaagaaacttgataatagagctgagcatatgatccttctagggtgtcattcaactggatcctacaagttgtttgatcataagaagaagaaaattgtgataagcagtgatgttgtggttgatgaaaaaaagagttggaattgggaagcaagcaagactgacaacaatgttcgtagtattactgtgagtcttgatgatgatcaggacaatatggaagctgctgttgaaacttaggttagaaggtcacaaagagaaagacatataccaccaaggttgcatgattatgagttgtttcctgattctgcaatcacaacagaaggtgagcttgtgcattttgcactattagctgaagcagagcctgtcaattttgagcaggctatgaagagtgcaaattggggagatgccatgctagaagaactcatatcaattgagaagaatgagacttgaaaattggtaacctggccttatacttggtgttcaaaaaagcaagatgttgttgatttgtcgtcctgtgaagttgagtatgttgctgccttagtaggagcatgtcaggctctatagttagaaactttgcttgaataattgaagctaagggaggccaaactagtaaagctattgattgacaataagtcagtaattgatttgacaaaacactctattgctcatggcaggagcaaacatattgaaaccaagtatcattttcttcgtgatcaagtcaacaaggacagattggtgttgcagtattgtagaacagaggagcagctagctgacatcttgaccaagcccttgaagaatgctaagtttgtagaactaagaagtagactaggtgtacaatctatgactaatctgaattaggaggtgtattggtgtaattcagttagttagtttgttagagtctacccaaatcaagtgggaccttgagctgtatatatactctgctttatcaatgaattacatatgaaatacattcagttttttgtgtgatatctcagtgtgcatatttcgaaagagtgagtgtgtatgaaataccaaagtacccaagtgtgtgagtatcataatgagtataaaatagagtgtatgtgcattcttgcaccatcaaagtttacttttgtatttctgatactttgtcatttaataaagaaagtaattgtatgggttatatataaaataggtaagtatgtgtagcttttctaaaaaaatgtgtagctcttattaagaatattgtttggtgttttttttacggttaataatgtttggtgttattagatatattgcaaaagaaagaatactggtttaatggtccaataaaaacaaaattgaatgtaatgaaagtttcattagaattgaatgtaacgaaattttatgttatatcctttttttcttacatttttatgttatcctttggctttacacagaaactagagaaaacatacagatttgtttcatattcgtttaactactctttttgcaacattggcgccgaaagaatgtgaagacatatgtcattctcatcctactcttagaccatttcgtcatcatttttgctttttgtttgtttctcacgtaatgaaacaaaactcaagtctattttttaggcaactaatttcttcgcaattgccataagccaatggcaagaaaaataataaaatacccctgtgatcactcaaattgacagttgtcagcttataattcaatttccaaaagtaacaaaaatagtgttctagttatgcctaacactaacagagaacatagtcaaaagagtagatgattgaataagtgattttcttaacagatatttttgggtgagcttgtttaaatttgaaaataataattttaaaataagtgatttttaaataaatgatttttaattattaaaattatttaaaaacaatttagaaaacatattttaaaaataaaaaaatatttatttattaaaataaagatttatttcaaaaaataaatttaaacaaaaaattgacccattatctccttaccaattcaattaaataattattaacatccaacaatttttttttgaaagtgacaactatatcctttaggatcctaaactaaagtatacgtacgtacatgagtattaaaaaagagagaggtgttactcgtgtgtgaaacggagaccagtcaaaacttcaagcatagcatgaaatgctattgcttcctactcccattacacaggagaaacagatacctttaccatgttcacactaaacgcaatgtttatcccactaaatcttaatttagtcaaaaggaatttattatatacatgattatccactctgctagtaaattattatgactccttttctgcaataacttaacttattttgtatttaggattgtacgtgttagatatattattttaatatttaatttgagatttaaatattttttcatgtaaatatgttattttttagttttagtctatgtaaattatgttttttaattttagttcttataaattaatgatagtgatactttctattgtgacatgatgatatcattaagtaatggtatgacatcatgatattattattctatttgtcacattattattataggaactaaaatattattttttgtaagaaccaaaaaaattaaattattaaaacaaaatatagatttaattcttaaaacattatctcaaggtgtaacgctccctcaatcatcagggtcattaccaagcataaacatcaaacataatccacaatcaaacatataatcaatcagagtttaagcagtttggaagcacaactaagaagtgacatcatcaagggtcactgtcataacactgtacatataatatggtgaatatacatataaactgtgtttaagtacaaaactgtacaaatacatcccctcagggtacaacaaaactaaaccaaaggcagaatacaaaagtatcagagctacaatgctcaagtcatctatgcctaaggtttcaaacaccgctatccctgcataggcttcttgccttggaatctatcagctcctcctgaagattcacctgcaaaacatatgccccacacaaggggtgagatataaaatcccagtaaactcagggcccttgaaggtatttccttcccctggttcacttccatacacatatacatgaaaatagtatatcaaaacaatccacatcaacaatacatgttcaactgacaacaatcagtgaatcactcaatcaattctcatgtacaacaatgcatctctgcctgaccacaatcagactaaactcatggcatacaaccatgatcatatccaatactatctcgctgaggctacctctagatatataggaacatctccaaccaggaggctacatctatatactaggaaacatctcatggcaggatttcaatgcgtctatcagaggctacatccgtatatataggaacatctccccctggaggctacatctatataacgggaacatctctttacaaggaggctacatctgctaatataggaacatctccccaggaggctacatctatatcgcaggaacatctccatcctatctcaatacaattgcccgaggaggctacgtctgtagatataagaacatctccatccgggaggcaacgtctatatcacaggaacatctcatatcgggacttactcaatcacatgtcatctatcctactacaataggatacaacaatcaaccatgcaggtaataagctaggcaaaccatggccatacatatcaatcacccaatctcacggtgtagctcacacaacaagtatcacatatcaaggtacatccatttccctttcacagggtacagcacaacattcaataaccagtcacaatacacaattttcacatatacatgtataacattacacagaaccatcaccataataaaataatggtggaactcagcaaaggatgcacaaacaagaaccaagagcttacctgctctaggcaacacactggctctcccggcctcgtggtcaacaccaccagagctatcaagctcacgtcctacagaaaacaaaagcacaaagtatcaataacggttctaagccgttaaaccgaaaggaaaccacaattcctttcccataacccataacaatcacttcacaagtgattctcagaccctcagaaaggatcttactcagccttcacaaggctccagagtctctaccatgactctgatcaaagcatatccctgcttatacagatcaattccaaacttctcattatcaccaattccagatgacaaacaacatctatactatctcatgagcaactttatcaactgctctaaggttcacactagtcatataactagccttttagctctgctcatatatactcagagccaaaatcaaacttcatcaataatgatgattcaaggctctaacttcctcaaaactaccctctgagcacaaaactctacagagtccaagcctaataacggctctaacacctccaaaaacatctctcaaggtattcaaaaccaaccaaaaacccaaacacagaatcaacggctaaggctcgagtttcttacctctgtgtagtccaagcacaccagggaatcactttccctaaggtagctcgctcaatcaaagcctccttcgcctctgattctttattccaaggactcccttagaaatctcgatctcgccgtttaccgcctcttgtcgagaataaagctgggtcactagcttatctcgaggctctgaacactttcccagttgggtcagaggtgtttagatgagaaatggagaagatatgaagctccacaagtcatcaatggccgttctctctctcttcctctctttctcttctcattttcgtccagaaatgagctatttataaaactgaaccgaaagtcccgcgcggttcgtgccaggtgccgcgctgatcgcgccatggttcgaataacccgcaccattagcgccatacccacgcggatcgcgtgaactggccgcaaggattggcctgattcaagcttcccgcgctgatcgtgccatatcccgcgctggtagcgccacagattcgaatcagccacgctagtagcgccatgtccacgctaatagcgtcagaaggccgaaagcattgcccttattcaagccttccgtgcggttagcgccagaccccacgcgggtcgcgccaaatattcgaatctgttttctccttctcttaagcttcctttaagggattctaatgcttgattatggttcttaatctcaggcttaaccctatgcttaaaattcaaggtattacacaaggcatgtttatatttctttcatttgcttttttagacattagcaagagctacttttcttatgtgagtgatctatgcatacatattttgatatatatttttaacttcttccattctatggtcaaaatattcaaatctcacaaaacacagaacaatttgtttgcaccaaaaataagtatgaaaaccgaaacttttgaatgaatatggacaataagaagcagctcacaatcgtccacacatgtgttcggcttctgcactttttagaattggtttgcggtttttggccatttgcactggtgaacaattaaagtaatatgcacgttccaataaactattcaaatgctctattaagaacaggaactagctatagctccacatttgggaattgagcggcgcatgaaaccctagatcatcgtgtattcagaggcttggtgatggtatgggataagcatggagtttaatttacaaaacaaaagcagacaacattgtagagtcatgcttaatcatgtccaaatgacaaacaattatctatatgtaacccgaccttgcatgtgtaggtagtaggtactacttgtttgatacattctccaaaatcaactagttaaattatgtcaaattcattatgtccagttcaatgtttttagctaaaatgtactacaatttagtggaagtcttgttgcaagtaatctgctaaatggaagttttgaagggactaaatgtagctcttggttaagagtgagcatgtataaacttgtgtgcgctatctcttttctttatgtccttatccttcatgttgttttgtgatgatcctttgtgaaatgcttttacttatacatgttggttttatgttgtaaccaatcttaactggttaactattcctatggttaactactccttatcacagtcgttgttaatttcccattttaaccatatacacaaaattacctttgatgaaaaaggtctatatataggtgtgtgtcttcaattttttgggattcctaaactcactcacatataagcgcatatacacatggatggatgcaggtgtaagatttggggggggggggcttaaattctcaagaatagataatttttttataataataaaataaagtaaaataaaaaaatagattaaacgtttacactagaagagaaattgaaaatcatagaaaaagaataataaaaaagatgaaaaataagagatgagtgagtgtgggtatgtatgtttgtaatttttatgaatgcagtggtcacgctcctgttatttttaagcatcagtcacacgctaattttgtcaattttttctcttttgaattatacttttttcacacttttgttataatggtttgttcctttcatttttttttacaaaaaaaaatttctggggcgctgtccccgaatcccgccactagtgccctcccttacttttttttctggatccgcccctgcatatacaccatctagtgcaaattgagagaagagtttggaagactcaagaaatcacttcacattgcagtattacaacccaatttaaggagcaatgatgagagatatttatattctattttattccgcattgatctaatattatttgtgaaaatgattagatcattaagtatataaaaatctaacatttggtatcagaacatggttcaacccctgctttgtttttacgtttttgagttttttcgggttttagtggatattttgatttaaagtcttaaaataaagtttgattttaagaatcataaagaaaatagatttctattgattatagactttaaatcatgaaaaacagtgtaaaattttatgaaaaaaggtttttaaaattacaaactgtgatttaaaattttgcgtgtttctatatccttttgcttaaagttgaagacaacttaagtgtgtgtcattttattaagtttcaaaactacaattccttttgattttgacattatcaagataacttgcatgttcttgtacctttactctgaaaagtaaaagcaagttcttgttttgcaatgcttttatgatacaagaaatgctattttgtcatcttatgctttataaattcatattaaaattttgcttgaccactgtacttgttttgaccaaggaaaatgtttgtgatatgcaaatttatcacttatgtatgtgatacagtaaagcattataaaattggcacaaaatgacaaaataacatcaaaagtaaaaaactcgatttccttcatatatgtttgcagggataccaaaatttttggcaaagcacgtgttgattaatttgtaaaggaaaatacataattgatattaattgtaattgatcatatatgatataataaatcttatcctacaagaattttattatattttatatggttaattaagataaaatattaaattatattattaagttacccataggaatgaaaaatataatttgatagttttatcataaagtatgtataatgaataaataaatgttcagtgatctttataatttaattaattaaggtttggccataacaaccttagttagttaaattataaattcagagcctttagatcacataaggaaaataacattaattgtaattagtcatatgtaatatgataagtatcatctcacaagattttttatcatgtttttgtatgattaattaggataaaaatattaagttatgttcttgatttgtccacagggattaggaaatataactgatatgttttatcattaagttcatatgaattttattgaattaaaattttggcctacagacaaattttatgtcactaaattcataattctttgagcatgttttacattggtaaaacgtgataatgatttatttttgtctcaaattttaataataagcatatatttgcagttgtacagcctattagttctattgaagttccggaattgagaggagacaattacccaatttggaaggagagaattctcctgaatttgggatatatagacattgatgaagctatcaggatacctgaaccaccagctattactgagaacggtgagctagatgaggtggatcgttttgaaaaatgggaaagatccaatcgtctgtgtgtcatgttcattaagactaagatctctgctggtattaggggctaagtggaaaagcataacaatgccaaagtgctcatgaagtctattgatgagcaatttgagacttcaggaaaagcactggccaatactctaatcatgagattttcatcaatgaagtccactgctttaaggggtatgcgtgagcacattatgcaaatgagggacattgcggcccaattgaaaactttggaggtggatatgtctgacatttttcttgtccactttatattgaacactctcctagcaccatatggtcccttcaaaatatccaataacacacataaggacaaatgtgttgattcaaaaggagtcacttgaagatgaacaaaggatcaagctcagatgttttgtgctttcaacatgccttgaatccttggaaatgagtttgtgattgttgtaaagggaagaagctatttttgattatccaatgtgcatatcattcatatcattcacttaggattgttagattatgtgttaatataaaagcaattgataattaaggcaagtttaaaaccaagtttttgggaaaataaggttaagctgatttaatcgattacagatagataggaatcaattattttgattcttcgtgccttctggaaaaccttctaagaacaatgtaatcgattacatatcggattaatcgattacctaggctaaaattgaaatatagaactctctgtcttaatcgattacagaatgttgtaatcgattatatactatgtttgtgtaaaacatgtttggcgggtttaatcaattaccagaaacagtaatcgattacttagtacaaactactttatgaagctcgctgatttaatcgattactaagagccgtaatcgattacatagtacatttgaaaatgtagagtttcttgtcttaatcaattacgtgatgggataatcgattattatgttcataactcaaacccagaacgtatcttaaacactttaatcgattacattcttgaattaatcgattacatatgctaaataatcgattacaaaagcgtatataatcgattattttcagttataattctgttataaatagaaccctttgctctattgagttactaacttgagaaatttgaattctgagcattcataagcgttcttaacactctattagtgatttttctgggttcacaaagttcttgccttcaccaaaattcatatgggttattgattgattgagtgaagcaaaatttgttttcaaatcttgaggaaagggatgttttaagtctgtaatctttcttcaacctggtgaatcattcatatgcatattgttcattggatcatcaggttacttctttccttagtctttgaagttgtaaatctgtttttaatttctgtagtgaattgtctattgtaaatgggtttcttgcttgttatctaaagatagagtttctctgagggtttgctgagtagtgttctcagtgggttgtctctaagaatctaatagtgttttagatttctgaactttatctaggattgataaagagaggctttgtaataacttgtaagaacagatatttgcaatagtggaactccattctagagttgagtggaagaaactggatgtagcttcatagtttttgaagtgaaccagtataaattgtggctgatctttattctcttctcatcatctcaatattgctttgatttgtggatcatattctttgcacaaaaagcttttcatttgtctattgattttcttgacagaggaatttgattgaatataaagattcttgatttcaaaagtttttttttgataaagatcatgtgaaaactctgatattaaaattttttaaataccaaggttcaaccaattcacctccccccttggttgtattgaagtattcctattattttcaaaatggtctattaatgagctcatgaccatgtgtgtttaagaggagggaaggttgcaattagaacaaggagagagttctttgctgacaattgagaaaaatgacaagaagaaaaaatataagaacaagggaattggtaaaataccacccagactggaattaagaaggaatcatccaagtgttttttctgtaaaaagaaagggcacatgaagaaagaatgttctaagttcaaacaatggtttgaaaagaaatgtatgcctacctctttagtctgttatgaatctaatatgattaatataaatcatagcacatggtggattgactctggttctacaatccatgtttcaaataccttacagggtatgcaaaacctaaggaaactagtgggcagtgaactgtgcatctattcaggcagcaagatgagttcacttatggaggccattggaacctgcagtttagttttaagaagtggttttactttgaatttggaaaagacattttatgttcctagtttttctaagaatttaatttgcaaaatgatatcacttatgacgctatacatattaatgttgacattaaacgatgtgttatgaataaggattcccctatgctgtggcaccggagattaggatacatctacattcagagaattaaaagattagtgaatgatagagtacttagtactttagatttcactgattttgagacttgtataaattgcattaagggaaagcacacaaacaagtctaaaaagggtgccaagaggagtactaaattattagagattatacatacagatatctgttgtcctaatatagacgtatatggtcataaatacttcatctcttttatagatgattattcacaatacatgtatctctgcatgcttaataataagtatgaagccttagatgcctttaaggtatttaagtatgagttagagaatcaatgggtaagcaaattaagatcgtgggatcggataaaggtggagaatactatggtagatacattgaagatggacaagcacctggtccatttgcgaggtttcttgaagagcatgggattgttgcccaatacactatacctggttctctgaatcagaatggtgtaacagaaaaaagaaaccgaacattattggatatggtgcgaagtatgctcagtagttccaagcttcctaagttcttgtggaaagaggcacttaagacggcaatgtacatattaaaccgagtttcaactaaggctgtttcaaaaacaccatttgagttatttaaaggttggaaacctagtttacgacatgtacgcgtttggggatgcccgtctgaagttcgaatttataacccacaagaaaagaagtttgactcgaggactattaatgggcatttcattggatatactggaaagtctaagggatatagattttattgtccatctcacaacactaggattgtggaatcaagaaatgctaaatttcttgataatgacttgattagtgggagcgatcaatacaaagattttgtttctgagaaggattattcagttgctcaaccatccacttcaaacgtgagactggttgtttccaaaatacccctccagttcaactgggtgttatacaaccaattgaaaaacaaaagaacacttcaaaacaaccaagaggggggtgaattggttgaactttggccaattaaaattttaaaatcagagtttaccacatgatctttatcacattcaaaattgtttcaaaatcaagaatcaatattcaatcaacttccctttccaagaacaatagaaaacagagtataatattttgtgcaatgaaattgattcacaaacaaagtaattaaaagatgaatgggtaagaagaaagattagccacagatttttatattggtttacctcaaactctatgaggctacatccagttcttctactcaacattagagtagagttccactattgcaaaaatgtccttacaagcaatcatacaagcctctcttcatcaaccctagatgaagttcagaagtctaaaatcctattagacccttagagaccaaaaccacacactgagaacactactcagctgttcctagagaaacactatctctacacttgcaagaaaaccatttacaatagactaatctttacagaaattcaaaagaacagaattacatcttcaaagacaaggaaagatatcacctgataatccaagaatgaatgcacaataaatgattctcaggttaaatgacagattacaatcacatatgcagtcctttccttatgctttaaatgaattatgcttcaccttcttgattcaaaaacccatatgaatttttgtgaagctaagtgtttttagacctcaacgaaactcactaatgaaagctcagagcgtttttgaacgcttacgaattcgtaattttacaacagatactcagataccaacctcagtctaagaggctccttttataacaactttttaactgaaaataatcgattaaacacgcttcagtaatcaattatttatcatttgtaatcgattaaatcaagatagtaatcgattaaaatgtttaagatatgacctgagtttcaagaacaaatcatttaatcgattattccgatacgtaatcgattaagacagaggtacatgtttttcaaaataaatattgtaatcgattaaagcaatatgtaatcgattaaaatgatcttgaagcattctgggttttgacaaagaacaatataatcgattattccgtgaagtaatcgattaagacagtcagcatgtatttttctaagaatgcatgttcaggcaagtaatcgattaccaatttttgtaatcgattaagacagagagttccatcttacatacaaagcctgagtaatcgattaaaccgatatataatcgattacaatgatcatgatttgttttcttaaggacacgaagaacagaataatcgattccattggctttgtaatcgattattaatattgcaactttatttttccaaaaacattgcttcttaagtacctttgtaatgaattggttttacttaatcattttaatcttatgatcctacatgaatgattaatgcatgatgtgcacatttggattatcagatcatatacttcctttttacagttaatcaaattggttcttcaagctttcctttgaacatttcctttgagcatgttgaaagcacaaaacctcttaagcttgatcttcattcattgatgaatggcttcacctgaatcaacaccaatcatacaagatccacaacctgctgatgatctagtagatcaagttgttcatgaggaacatgaagaaattgttgaccaaccagccgaacaacaagttcctcaagaagctaatgtctcaatattacaaaaatctactagagtaaggaaatcagcgatacctagtgattatgttgtgtatttgcaagagtctgattataacataggagctgcaaatgatcctgaaatgtttttacaagccatgaattgtaaagaatcaaatttatggtatgatgctatgcatgacgagatgaattctatgggatcaaatagagtctgggatcttgatcagttgcgtgatggtgcaaaagccattggatgtaaatgggtttttaagacaaagaaagactcattaggcaacattagagatacaaagcaagactcgtagccaaagaatttaatcaaaaggaagggatcgattataaggagacattttctcctgtgtcgaagaaagataccctttgtatcatcctagcattggttgcacattttgacttatggttgcaacaaatggatgtgaaaacaactttttctcaatggaaatctagaggaagaggtttatatgaaacaaccagaaggatttttctctagtgacaatgagaaattagtgtgtaagcttaagaagtctatatatggattgaaacaagcctcctgtcaatggtatttaaaatttcatgatgttatttcctcatttggttttgtggaaaatattatggatcaatgtatatactagaaggtcagtgggagaaaaatttgttttcttattctatatgtggatgacattttacttgtaaccaatgataagggtttgttatatgaggtgaaacaatttctctcaaaaaattttgatatgaaggatatgggtgatgcctcttatgttatttacattaatatccatagagatagaatacgagatattcttggtttatctcaagagacctatatcaataatgttttgaaaagattcaggatgagtgattgttcaccaagtgtagctcctattgtgaagggtgataagcttgatttaagtcagttccccaagaatgatcttgagagggaacaaatgaagaacattccttatgcttcagctgttggaagcattatgtatgctcaggtctgcacaagacctgatattgcttttgctgtttgagtattagggagatatcaaagtaatccaggtgtagaccattggaaagctgcaaagaaagtgatgagataccttcaagggactaaagattacatgtttatgtatagacgaactgacaatttggaagtaattggctactctgattcagactacgctggttgcattgattcgagaaaatccactttaggatatctatttatgctagccagcggagctgtctattggagaagtatcaagcaaactttaactgctacttccactgtggatgaaaggttttatttatgggcttagagtcatggattctatttctaggccattgaggatatattgtgataattcagctgttgtttttatggctaagaacaacaaaagtggtagtcgaagtaaacatatcgacattaagtatctagccataagagaacgtgtcaaggataaaacagtggttattgagcacattagcactgaattaatggttgctgatcctttaactaagggcatgacaccatttaaatttaaggatcatgtagatagaatgagacttggttcctttatataattttcatccaataacgatattgttttgataaaactctattatgatgttttcattcaaattatgcgcatataaagttattaattttgagaaacatcaataaagtttggacctagaataaacgttgagtttatacattaagttatatgggcttgagaaatataatgcaatgtgatacatgaaagataatactcacatacattagaggacctattgccatgattcatgtattttatttctcattatgtaaatgatgggatatgtgaaccaagtgggagaatgttggttttactttgtaacctaccttaattggttaactattcctatggttaactaccccttatcagaaccgttgttaacttcccattctaaccatacacacaaaaccacctttgatggaaaaggtctatatataggtaagtgtcttcaatttctggggttcctgaactcactcacatataagtgcatatacaccatctagtgcaaattgagagaagagtttggaagacttaaataaatcacttcacattgcagtattacaacccaattcaaggagcaatggcgggagatatttatattctattttatcatgtattgatctaatattatttgtgaaaatgattagatcattaagtatataaaaatctaacagtacatagttcagtacgatattcttagatgaccgacttatatatcttaagggaattgactctttacatctgggaagttaaaacaatgtttgactcctatgactgaaaaaatgaaacaatagggagtactatactaagtcgcactctagggacatgatcgatgataggatcagggaaataccatgacttgacatctcaaacacacacaactacacatcttgaaccacatacgagaacgagactaaacatgcacactagtgtggccaaaagaaaccaataaaattattacacgtgaacatcattgttaggaagcaacatgtataaatagagatgagctgcatgattcacctcaaggttcatggttaggtagatctaggggagatgttgacaatgacttaagctagatccctttgtctcttctttcttttagtgagatgctgacaatgacttgagctagagccccttgtctcttcttttttttaatgttcttggatgtgaacataaacgaaatgaaaatatttgtttgcatttttttttaaaatacataatacttaattcaactcccttcttgtgtgtttctttgttatttcaataataaaatatatatttttattatgaaataactaagttaaatagctatgtgattttgttggtaataaagcatggattctaatcccacctctatctttttttaatcattttttttgcatatttaattaatttacatctaattgcatgttcaatgacacattagtgatacatgttagtgtcacatatattgtcatgttaacatcaaagtgtcataccatcaaccaacattatcaactcattagacaacaaatgtccaactaatgaataaggaaaatttgtggaatattaagaatagaagataaaatgtgtggaaaaaatgtgataaatccactaaatcctaaaaattaggagacaaaatgtaccactaaacctattttgtcatcttatccccctccccttctcacaacaaaagaaacatgtttcctcttcaacattctcatccccttttccacctgttttgccccattataccttacttttcacctcctttcctcacccattactctccattgatgtcttgaagaattcaaatgaccttcattttctttgcatcttccttcctagataagagctcgaaatcaaatgaaatgtcaattttggatcctttgacgaagcaagagagtctagggaagggcctaggaaaattgttgtctttgttgtcccctaatgtcgtgtctctatactttaaccgtctaactaacattatgtgtggcccccttaatacacaaggttctacatattgtagctctaactataagatcatagttctaaggaagagtaaaaaatggagagagtagaatctaaaagcaacataatgaccaacatgtttggaaaattgagtaaagaaaattaataaatgggatccaaaaaattctcaaattttttatctgtagaaattgatagtgttaagaatgtttacaataactaacacatttgctcaatcaagacctaattttttattttcttacttttaaacctagtttatgcattagatagtacaacaaaatcatacttaaataggccaaaatcttcaacttaaggttttttcacgtataattatattatcaacaaaagtatttcgtaaatgatatttaaaatgagataaaaagtgcaaatacaatattatcttttggctaaattgtaattttggttctcctagttttccaaatccatgattttggtagcttaatttttaatagtaacatttgatcttctaattttttaaatttgcgattttggtctctcgaatattattaactaataattatgattattagatatataaattaattataaattaaataaaaaatactaatcataaaaactttaataaaagactgttaaccttaatgtgatattattgctggtggagtcgtgtacgataatggaagtaaaatatgcatttgtgaagaaaaggtactagtatattattttgaaaaattaggattaataatttttattcaaattttaatattaatgattttaatcaatttataattaatttaataactcaaataatcataattttttgttaataatctaccatgagaatcaaaattactaatttataagactagagaacaaatattacaattaaaatccaaaaaaatcaaaattatatatttaagaaactaaaacaacaagatcgcagtttaacctaatttttttcaagatctaggaaacagttttgaaaattaaaattagtggagtgcatgttagttaattaatggggaacatgcaggcatgtacccgtccactaagtggggcccatccccgccacgctggtggtgtggtcgacaaacaaaccaaatggcccagtcaatgtcgtcttctaacccatcacactgcacctccagctacacacaacaactcacgtcttagagcacctttagtgctagatcccaatttgggatcttagcttactttttgatgggtcccacactgccacgtaggattaaagatctctcaagatctgtagcatttgttgctttattggtagatctcaaattgagatcttagaacatctttaatgggtcccacatggaccccacttttaaattttttaattttgattaaattaaattaattaagtaataaattttaattaataatgcataggaaaaaaatatattaacattaagaaatgataaaatttaaataatttttatttataattaaatgttaaataagtgaaaaaatacatgaaattgatgataaaaaaatgcaagacattaattttaaagaaaaatcaattttcatcatttttgtgaccgaattgttcccaaatatgctctaccaagtctgcttgaagttgttgatgaatttctcttacatgcataacacatcttgtttgcaagtatgtagcaaagtcaggaggagcaccacgagatacttcaacatttgaaatgtcattatctacgtgatcataatcaatatcgacattaccaccaaatgtatctcgttcgtcttcgacaatcatgttatgcaatataatgcatgccaacattatatccttcattgtatccatgttccaggaacacgatggaccgcatataactgcgaatcgagatttgagcacaccaaatgatcgttcaacatcctttctcaccgcttcttgacattttgaaaataatttccttttcgaaaacaaattttagaaaaaacgactagtttaacggctagtttgtaatttttaattttttttcatttttccatctcctcacccccattcctccccttcacacccccttttcttttttttttttcatctctaacggtcacttaccctttcttttttttttcctctcccctcctaatccaacggtcacttcctctcgttattatttttttttcttcccccctctctagaaagttccctgttcccttctccccccgcccccccttttttttcactcaccctctctcactcacggtcccttccccccccctccccacacttttcttttctttttttttccctttcccggtccctccccccctccccccccccttcccttcccttcccttccctcacgttcccccaccccctccctacaattttcttttttttctttttcttccccacccccacgacctttccccttccctttccttctcccatatttttttttctttcttcttcttctgtcccctttccccctccaacttttctttctttcttctttcccctttcccttcgtcctgctcctttttttttttcttcttccccctccttttcacggtgcctcctttgcagttcaagcctttccctcctctgcttccctcaggtatcgttggtttctttctctttttttttttccatttctgttgggtgctgggttgttgctccccgcccattttgtgatctgttaatataaaaaatgcatttttcttgaaaaatgtgtggatcttgatgggtcttgtggaagacccagttctccacgtggagatcctgagctcccctttaatggtggatcttagaaagtagagatcttcacctcaagatctctctctaagatccagcactaaaggtgctcttatatctcttcaaaggcgcgtgtcttacaccttctgctatttaaatattgtaattaatttttaggacacaagtatatatgaataaattattgatttgagtaatctgaactgattaacgtcatgtaagttttgacaccccaatattacactgtaccctcctcactgattaatgtcatttaagttttgacagaaaagagtgaaaaaatgagaagggcacgtcagaaataacataaaagggagaaatgactttttaggttttattatttttaggttaaattagtttttttttcttttaattttcttattttgtcctttaattcttttaagttcaattaaattctttacttttttttccgactcaatcctctcattttaaagtagtttcaattatgttcatatggttagttttaactaggttcatatcatcagtttcaactaaagaaactaattatgaaattcaggtcatcgttgatgtgttgtttcgttttttgacacacagacacaaacttaacgttattattaaaaattcatgttaattaaggacttaattgaacattcacttttagtttttttttttttacaataatatgtttaaattatattatatgattagtaaaagatttcgatcaacaatagttaatatagtggtaatgatttgtgttgtttattcaagtgatttagaaaaataaaagatcagccaagcggtcgaattatcaaattttcggtccagttgttatattttcgctttttcgttttactttatgcaatagttttgttgaagggagtacctagataatataggagaacatgcttgcagatatgataaattttaaaatttgtagcatacgatgtaatcaagattggtatatgaaactatgaagagatgcatacatacatattttgatttttatatatgtctttccatgataactataatattaatcacggatggatgacttttatttttttatttttttgagaaggatggatggctaaatccatcatttttatacaggagtgataaaactctcaacccaactcaatttaagaaaaaataggagtggatccgtgtaaatgtaatgcacagatttttaagtgacaaaagagaaaaagaaaaaaaaaaaaaagagaaagtgagacagaaaaaagaaagtaaattattaaaaaataaaaatgtagaattgtcccaccattgacacgtaggagcggctgaacagttttatataaatatatgctaacaatattcacccgagacattatcttttgtctttagactcttattgtattaagtttttacacctcatgtcaatcatgtgcagtcgagagaatttagctatcttctttatcctaatatttgtagaaagcatttgaagtttttctttcgtttttagttcttaaatgcttacatgtgtagagtttagaaatacttggtttgaaaaaaaatacttagattttgaggctttgaagtttttctttcgtttttagttcttaactgcttacatgtgtagagtttagaaatacttggttggaaaaaatatacttagattttgaggctgaaaagatttgtacaataatacttggaaataaagcgttatatatcctctttgctcaaacttttctaatactgacaaatcttaatttatatccgataaagagaactgaaaaaggataaaagtgtggtaaatgaaaagatttgtacaataatactctggaaataaagtgttatatatcctcattgttcaaacttttctaatactgaaaaatcttaggctatatttgatgaagaggaatgaaaaaaaagataaaagtgtgaaaaatgaaaaaaaataaaataaaagtaaacttatttgatataactgaaaaagagggcaaaagaatccaaataatacatttttaatataaatttaccaatttgggactgttttagaacataatacaaatatggggcagttgaacacgtccagcctgggctggagtggtcatgcccagattaggcgtgactggtcatgcctaatctaggcgtggtcactctagctcagcctggacgtgtccctctgccttaaaaacccatcccagcttcagtttccatcacttgtgctgattcagtttctttgtaaaagctcttgtagtgtatctgtgttagagtttaaggttttatccctgcagcgaagctctgcgcgtttgtgagtggttttcaaaaagtgttgaagctctgctaacaagttaatttatttgatgcatattatttaatatattatattattgtaatataaaactgttagcgactgttagcgactgttaggtataactaggtttgtatcaaaacaattaggtattagggtgtagggtttagtttcggttagggtttagggcttagggatgatgattgatataacgacttcgtttaatttccttattttaatctattacgttgatttcgtttttatcgattacgtttttagttgacggaaaaataaaattttctacgtgattcggttacgtaaaagaatattctaaacgatttgctacgttggaatgatttaacataatacatagtctagttaatttaagcataattaagtaaaacagtccgtgtacagttatccataataaaatacaaaccactatcaagtagtaccatatgaattacataactctcaaaaagcagccacaacaaacgatatcaagtcaaaacacaacataaaactcatcaagcttctccatgtctcagctaatcactgttcctctgctcgcccaaattaattggggtcattacaggtgtcaaaccacagacacaactcgggtaagtatttaataaacatgattagataattgacagaaattaaaataacatcacagataattaaagaataaatcatcatttacaaacagaaacagatacatgggaaatgatgcatgatttcttcattaaatgatgcatgactgagatctcagaggcctaattaaaggtactagaaattaaaatagtttcactcactctagtgaaacagtcccacccactccagtgagaccttcatccactccaagggaaaaggtatcatacagttccacccactccagtggaacagtcccacccactccaatgagacctccctccactccgagggaaaatgcaaaagtgaatgtaatgattttctttcattttcaattaccctttgatatttattccattcaaattctcttgattttggcaccatcacttcatcataattaatttcatgtaaaagatacaagtgtgccataatttcttttagagaaataaatcatatgtccatgacctaatttctaataaaataggcatcaaatcttcatcataactcaacctcaagtgaatgtgaaaatatcatacagctacatcaactcatacagctatatcaacaaataaaatacaatcagcaactcaattaaatacaacaaccgaataaaacatacaacaatatgcaacaacatggtatcatacagaatttattaaatatagcaacagcaacattacttacagcatacagccaccctaaatacaacagtttacaacaacataataaataaaatacagcaacatcatacaatcataacagcaacataataaattaagtaacaacatacaacaatattacatcattatacgacagcttaataaattatacaacaacctcaactattaaatacaacaacataatctcatacagctatatttaattaacaactcaacaacatcaaataattaattacaaatccaacaaaatagaattagtcctattaattaaccagaattacttatactaatttactactttcattttaaactaagtaggtattcaagttataatctataaattattctagttcatttgggactttcattaaacacatggcatgctaacttttaagttttgttaaataaggaagaacttggcttaatcctagaagattagaggttaaattatcctaatcaactacctaattcatgtttaccaagatactccccatacctttggctttttttgatggaattgaacaactttcttccaaagttcctagcctttcatgtgactttgcttgatgggtggtcttttgttttggtttttgctttaagtgaaaaggatgggtggctgaatttggaatggtatccgtgcaatagcctcccattttggtcccaccatcctttatatacttggtttcatttgctttaattgaaaatatcctacaacttcataattgcctagcttttttgttggtttatttctattggctcttgcttcctatccctacaagtgtccttgatcatgatttttccacatctttcctttgctttgttggtgaatccgtgcaaattgatcaagcttggggccttgaatttttcacgtgaagtatcttggcttttagaagatttttgccaaaattactttccatttggtccaataaggtttctctttgccttatagtcgtccaagtgtctcctttctcaagatttctaaagctttcttccttgttccatgaagtgcacggtttttaacttgattttggtacaatatgatttagttttagcttaaaccgtggactagctcttagtttagggattttatacttttatttttcttaactgaagtgtttgaattgaataaaatcattttttgaattttagaaaaccttaatctaacttgcttccttaagaataaattttcaaaattagttagaagctaccttaaagttttagtaacattaataagttgtcacacaatttctttctacgattttatctaattttctattggtccaattagttttttattagtaaaatgtttagactacttacttaaagaatctattccttcaataattaagaaaaattccctagactgtacctttcctttttctgtgtttttatagaactttgattagcctagattcaattctttttgagttatctttcaaaatttctaaaaattctattttgtggtttttctttactaaaaataccaatagatccttatctagaagtgttctacccttttgtcaagttcccctaaccttactgaggctatctgatctcatcagagctaaaaggatattttggtcatttgggtaaatgttcaggggcattttagtcttttaccctagggacctaactgtcatttatgaaattgttcaaggatattttggtcatttttaaaaacatctaagggtacttatgtcatttattttaggaatgcagatttatcagataatgcacatatatagtaaattatgagggtgttacaattgacagttagggtttagggttgatggttagggtttaggtttgaaatgtaatttattttacaaaatttagggttttggtttaaggggtatgacttagggtttagggttacagtttagcatgaaagggtttaggggttagggtttagtttcggctagggtttatggcttagggatgatgactgacagtttagggtttatgattgatggttacggtttaggtttgaaatgtaatttattttacaaaatttagggtttaggtttagggggtatgacgtagggtttaggggaacgatttagcatgaatggtttaggggtttagcatgaaggggttagtggtttagggtttagggtttgttaaattaggtgtatgaatatgtatttatgttgttttatgaattaatttatttattagtaatgataagaacgtattataagagaatattttttttatttatgtgaaaaaggcagttcaaccgaaaagtttggcttttgtttactggaagagatgagttcaggtggtcaggagtttgcttgttttgtgttgttttttaatggaagaaaagttgaagggccacgcgatattgtttttgaaggggacaagaggcagacacgtatcaagagaaggtcgacactgattgaattgcatcagaagatacgacaaaaattaggtttggaggacaaccaacatatcactatgcttacaggaatatcatggcaacgtgaacaatacatgggttttcagcttgcggatgatgaagacattgaattcttaatggaagaatatttcaatcaggctaacccagatttcatagagttgtacgtggattatactggagcagaggatgttataccagtaaggagagttccttcaaacagtgcgcgtaatgcatcatcacatggtgctccatttttacacgtgtctgaggaagactcacatgacccaacttgggtcatggatgaagaagaagaggatgacgatgataagatttttgcaatggaagattgtcttcttcaggaggatggtagtgggtcagataatgataacgatgctggtgtgcatgcgactggattccaagaagacgctgatgtgcggtcatctcaaatccatgatcatgcggacgttggatgtatgcgatcagaagcacctgttgaaggtatgttacatgattgcagtaaatgatgaagttctatcatatatgtgtatagtattttatcttccatcacatggttattgaactgatttatatttgaaggtggtgaggtcattcctttttgggatggaattcctcattacacatatattgattggagtcatccaagcgaagaagactcttttcgagattctggttcgggttcgggttcaggttcagtgcagggtccatggcaattaagggatccattgtttgttaaacaagagtttccctctaaaaaggacgcacaaactgcaattaagcggaacttgatgaaggagcatcaagaggcatatgttgttgaaagcaagcctaacaagtttagctacaagtgtattgctcataacgagggttgtccatggagggttagggtcattaaaccaacgtacggtgagaagtgggttgtttcaaggtgggttgacaaccacaattgcttgaatgaccatattacacaaggtcatagacagcttgatgctgatgttattgcttcacatatagcaggtatgtttttatcaccatttaatttcgtgtatatgtcttcaataatggttctttaaggttgataatgtaaatgtgagtgttgctatttcattgttaggaatgattaaggagaacccgtctgtgtcaattgcattggttcaggagaggatcagccattcatttggattcaaagtttcatatcggaaggcctggtatgcaaagcagaaagcaatgacaatgatttatggggattgggaagaatcttaagcatttttgcccaagtggtgtagctacatgcttcgtttttccccaggttctttttatgatatccagaccaatgattatttcgtggcacatcgcctggtacggacaaacatgtgtttcattgcatgttctggacttttagacagtgttgcgaagcattcaacttctgcaaacccatgattcaaattgatggaacacatttgtatggcaagtatacaggtaaattgttgattgccacgactcaggatggcaataatgaatgtctgccactggcatttgcaatagttgagagggagactttggaagcctgggaatatttccttgctaacattcgtctccacgttacacaaagacgagacatatgtctgatttcagataggcactagagcatactatttgctgtggcgaatcatcctggttggcaaccaccttttgctcatcacgtgttttgccttcgttatattgccagtaattttaatcaaaagttcaaaaatcaacagttgaagaaggcccttatgaatttaggtatggttaacaagtattttcaatctattaaatacataaattattcaacagaaaagtgttaatagtatgactgttttgcaggttacaatccctgtttgaatcattttgaggcagactttgcacgatttcgtgattgcagtcctgaggttgccgaatggattgatgccatccccaaggaaaagtggacacgtgcatatgatgttgaagggaggagatttggtcatatgacaacaaacttgtccaaatcagttaaccgagtgctgaagggagcaagaaacatgcctatcacagctctggtgaagcacacatacaacagattagttgaatattttgtgaagaggggtacagtggctatttcacaagttgatccttcagtacgacattgcaaaaatgtggttgatgctatgaggcataatcagatagttgctacatgccaccatgtacacacatataatgttgatcaaacatcatttgaggtggaagagggctgtgaaaggtcttattcagtaaactgacgcgagcattattgtcagtgtggtaagtttaaggccttcaaatacccatgtagtcatgccatagttgctgctttacatgttcgacagaatcttcttcagtttgtggatgatgtgttccttgtaagcaacttggttcaggcttattcatttccatggcaaccaattggtaatgaacgtgcaattccaccaagagaaggtccaattatcatacctgataggctaatgttgcgtggaaagggtcgtccaaagtctaccagaatatgtaacgagatggacgaagttgaaactagtcaaggatgcccaagatgctccatttgcaagctagtcggacataatcggagagcttgtcctaatcgccatgctatttcctgattttgtaatgatgtttcttttgtctcatgttaatgtatttgattgcttgtattaaaaatttgtttaaaatatgtgttgagactttcatgttttgtgaattttgaataagcaacgttgtttaacaaatgaaaaatgcgaaatgcacaatttaaataagaacaacaattcgaattaaccaaacttaatgcattcaatttgacaataacaattgaaatttgataacaaaatgactaataatcagttacacatatgttgtgcagtggacatgtcttattccatttgccctactgctttgataaaaatagctatgatttctattggacaaaaacgtttccaatagttggattcagccaaaaccttaaacaagtcttcatcggttatcaactcttttatggatattcaattatgttctctgaataagcgtggtgggctggctgtcgaaaaaacaattttcttaccacctgtgagttgtgaattccataagggggaaccccaacaggcgcaacttccttgatgacattctttagtgtttgcacgttgcatcctgaacgaatttcaaaccttgttggatttgttccagtgaatgaatagcccacaaaaccgccttgtcgtggtatgttccacctgccgttgtaatacaacattgcatcatgtgtggggacgagggtggatcggaggaggtttagtataccatcgggtgtcctgttgattgtacataataattctatagggccagcacacgacatttcccgattgctcattaacattgtgcaaacatcatcatcatttagcagttgtatagaattaaaataatattactgacctgagtgtatggatggctgtcggtagtagatttcatcaacaaattgttcactatttagcgaaagggtgtcgttcatcctacgcttgagtgtctgaaaagaacactcattaggaacccgcattggtattggagtggggctttcaaaataaacacctgtttcgttgtgtttcatcgatccatttgggaaaatgaatgccaatttggagttaacaatggattgactacttgtttctcctaagaatgacatggtgttcagattgaatttcatttatggacgtatgttctgtgacaatgttttgcttaaatagggatgaagtcgtgcaaatttaggcgtgaccaccccatttgttagttgggcgtattcaatcacgccctatttgggcgtattcaatcacgcattaattgggtgtattcaatgatgccctaattgggtgtggccgtgtgtggcgatgcaataattgttggtgttattcggtgatgccctatttgaccgtgttaagtgacagtacatttattgatcttctccaataacgcgttatttggggttgttaacttacggcgtacatgttgtcgtgtttactaatgaccgatttcgtagtcattcattcacaagaaacgtacactacaaaataaagtctattacatgacatgaatataaaataaagtcaattacaaacacaactaatatatacacaaacaaaataacaaactaagacggaggtggccatggctgatgacacgcttgatgatccggcatgatgcgtctgctactacgcagagaaggcctgacctgagacgggcctgactcactagggtcgggctgtgaaggaccagcctcaaccgcctgaggaggggcaacatcaacaggtgcgtatagacctccctcatatggtgatgatggctggggataagaaggaggtggggtgccacagtttggaaatggagggtagaccacacaacctgtgggagtacaatcaagctgatcaaccaggcacgcataatcagcatcagtccactccggaccctgagtccacgccggaacagggtcgaaagtactggtcccacaagctgctgatgccatgtctatagcagtagcacagaagacatcctgtggctgggggtcagctggtggtggaacgtaatcctcggtagtgaacccctgatggcccatgtctccttggtgggcgctttcataatacaaaggctggctaccgtatgtagatcctatcgcaggaggcctaaaaacaccagcagtgcgaggcctgggaactccaatgggttcagggacatggtgcataactttccgccgacgctctaacccatgcccctcctgtctcccgcggggaacattcaaagacacctatggctaacgctgaagctgcgatgttggtgcatgtgggcctgactcctccaatcgacagctctctcggaacatggaaataatgcgacccacctcctcgtgcaagtatcccatcgtgaagtccgaccactcccctgaactggaatagtatatcatctccaacccgtcaatctgcaaattacaaaacaaattaattagttcacagtataacaacatgatcattaaagcaattttatgatttattttttaacacttacaccactacccaacttcgcagccatcttcgtcacgtatcgcttcccattctccctataccaaaccatgtactcatggtttggtgacagtaagccagttagtaggggggcagctcaatgtgctgggccctctgctcccatcgctgtatgaagggtctgagcttacgcaaccaattatcttgttgtttgcctcggagggagagatcatgcacacctttcaacttcctgggccttcgggggattggctgatccctcccaaactgtcgcatacatctgtcaggatgacaatattcaactgtgtggaagcatataatgggactagtagccatccacaacagtctctcatcctcagatgcatcaagaaagtggtagcctacatatggttgccaaaccacctaaacaaaacaatgaaacacataattattaaatgatccaatctaagcaaccaaacttatacaaagaacattatgtacctcatctcgagtaagggagtctaatctctctcgatgccaatgaagctcatgtagttggaacttcgctaaagcgttaaacctattttcaaaataagttacattacacaactgataacagttaataacaaatatcatactcagtaaacaaaataaaataacaacacatacctgtggctgtaatgccacgcaggctaagtagggtcaggaatagctagagcaatgggtgagaatctgatccacgcccatatctgcagaagagtgtgacacccaccaatgtcatttctgtctacatttgtacactcacacatttgtctgaacaaatgtgctagaatcgtcgaaccccagctatacctacctatatcccccatgtcccctgcaagcaaacggatatagcgacaggcgagtgtgcttcccccggatcgatcacatattagccatgctccaatgatacgcgcaatgtgcgccttcaaaaaccgcatcacctggactacataatcatcatccacgttggcccaatgttcataaagcctatcaaagtaactatggcgcaacaatcatccttttagctcagtatctagaggaggatgatcgaacacctcctcgataatggtatcccactcgtctgaggtggatccattgacgacatggtcgtgactgcttaaacctaagatggcagccacgtcctccaacgtgatcgtcatctctccttgtggcatatgtgtctctggtctccacctttccaccaaagcactgataagtgcaacatcgatatgaacacaagttcaaaattaatcaattcgcatctgtacttataaacgaaaacattgatatcagtcaattcatatgtacaattcttaaattcataattggatacctggatatgttgcatgcgtgcaacatgcaggaacccagcctgtcctaacatccacacaaccatgtcaggtatatcatcacactttggccctcctccaattttgccacgtcgtgtctttagcacccgacatctgtcctcgttccacacggcctgtgaaacgtgggtctgctgggtacgcctccgcagaaccccccacttatatggggtgggtaaaacatgcatcgtcggatccatacccttgccctcgtgatcggatccggaccgtgacgaatcaggagatgaatcaaccatctatgacaatgttaatactaatgaaacaatataataattggctaattaatagcttaaaattattaacttaacataaacccccaattttgtaaaacataaaccctaaaatttgtgaaccctaaaccgccaattttgtaaaacctcaaccctaagatttgtgaacactaaaccaacacttatatcaaccctaaacactaaattttgtgaaccctaaacccccatttatgtcaaccctaaaccctaaacctaaaacttgtgaaccctaaaccaacaattatgtcaaccctaaaccctaaattttgtgaaccctaaacctaaaccctcatttatgtcaaccataaacactacattttgtaaaccctaaacccctaactttgtaaaacctaaaccctaaaattgaactaacaaaacattgtcatatcattttcatttaacaactaatccttggaccccgaaccctacatttaccaaaccctaaacaataaattttctaaaccctaaaccatacattcagtcagccctaacccctaacatttgtaaaccctacaccattattcgtaaaccctaaacctaggttttgtcaaccctaaccctaacccattaccccataaaccctaatccctaaatcctacacactaaaccctaaatcatgcacatcaataccctacgcctaaatcatcaacaacactaattatacctaacggttttctacaaatataataatacctaacagtttctaacaatttcatatagtcctaacaattctattatttaataatataacattttaaataatatgcatgaataataaatttacttacttgttcgcagagcttaagcacacgtatatcacccgcaaactgacagagctttgctgcagaggaaaatctctcacaaatcctagagagatggactagagaaaactttagagaaaaggtgaaatgttacaaatggtaaaaagtaacttccgggaggcatttataggcagctgaacacgtccagcctaggctggacgtgtttaactgccccagatttgtattatgttccaaaacagtcctaaattggtaaatttatattaaaaatgtattatttggattcttttgccgaaaaagagtttaaaaatgattcgttttaattaaaatgatttgataaataaaaaatattaaagtgattttcataatgttgggcgatgttgtaataaaacaatattatgtatttcaaatatcactttcactatttcagctcctttcctcgtattttgcagtgaaagtttacgccgtggggtccacatactttatcacttccgcctacactataaacgcgaaaacaaagaaataaaagcataaatgctaaaacacttttaaaaaattgaaacttttcaaaaactagtatttcaagagtcatatattaaaaatttttattaaattttacgatgatttttacaaaataatctcaagtaaaacaactttttaagatgattttcaaaaaaccgtttagaatgataatttttaagatgattttttaaaactatttttgtgaaaaagtctcaaatttataaaattatcacatccggtttttgagaaccataatcaattatgtgttataaaaatcatttttttaatagtgtgtttcatatgttccaaacagttcattttcgtgggaaggctttcgcctgtaatcaaacatacacttaatgaatgttggagattataaacatagtcctcgtgtcatcttatgatcattactcttttagtattatttgtttattaatctagatgttgagttttaattgtgattctcttggaggtataaatctagatattaagtttttgttgaaaaatctcaaatttacaaaattgtcagccaatatttttagaaccatagtcaattatgcgatataaaaaattatttttttaatattgtatttcatctatttcagactcaataacaggttctttttatcgccttccatcgcagttcactttcatcgggaggctttcgcctgcaatcaaacacatgcttaatgtatgttaaagattatagacatagtccttgtgtcatcttatgatcattactcttttagtattatttgtttattaatctagatattgagttttaattgtgattgctcttgaaggtataaatgagttcaattatttattttatttttttaattattttttattattttttgaataattttatattaaattatatattttaactattattaagcaaaataacataataaaaatataatatttatttaagtgaatattttttaactttattttaaatctgattaaaatattttaagatataatataagattaatagtaagataaataatatggaaagaatgtaataattaaaactaaaatttaatgaaaataatttatctataaaaaatattacaataatttaaaattatttaaaaaactaaaattataagacctcaaaacatatttttatccattaaattaattttatataaaatatcatatcaatatatttatttatatcattttatatttttaagttatttggttagatgattttatcgaatatttatgatttaataaattaatttaaaagttttaaattatcaattgtcagctaattttccaattaattttattcaacatagcctaaatattttttcattttgtataaaacctatttgactttaactcaataagtatttaactaagtttttatttaattaaataaataaactcaattatttaaatgtgttggcttgaactttacaagcctaacattggcggggtatgaatacactatttgtttaattgatatagaaattttgctagaatttgttatttatatgttcaatatggaaatatatagaattttgttgagaatatttaaattattttaaaagttttgttttttcttaagacgttataatttttttacgagtgaacaactatattaaaattagaagacattgtcacattaatcttgaaattaagaaatgccaaataagtttctaaacttaattatttatttttattttagtttttaaacatatgttaatatttttacttaattcacattattttaaatttttcattaatgtaattattgatttatacttgtagaacttttttttttcttcgattaagggattgatgtgataatacattctaatttcacgaactaaagtgattgttcatgtaactttttatttactggattatgaaaatatagtagtagttatatgttttaattctacatgcaacttgttgagcacatctttctatttgtaaattagcaaatgttattaaattgtttattaaatactaaattgataaagttaaaaataattttaaaatgtacataaaaaacaaaaattataaagctgcaaaagagttaaataagtcaaattggaactttatatttttaccttgaaagtgtataatgttgtcacaatagtctctgaaatttaagaaaaaagtcattgaaagtattattcatcaatcacatttgtccaatttttttttttttttaaaaaatgacttaagcgataatattaacataccaaaatgatattaagtgataatatttagaaatttggatgtaataactgagaatttcaaacacttttttttttatagtttctaggactaatgcgataacatgttatcctttaagggactaaatgccttcaaactattttaaatttctttaaatgacattgaaattgtgaataataaatttgacattttttttattgaacattagcatgaatttataatacatgttatgaaccaatcattttgtagggtgtaagtagatgtaatttattttgttaattaatcaattggttttctttatatatgtgatcacaacacgagcaattaatattatatttttttttgtttgcatgctattagtatgaatagctatccattttagtaatgactaatttctgtaggagaacttagttggatatctatggttggactcatttatctcaatcatattatttctatccataagatttaaactcgagatctcacttaagggagctgaatttagtactactcgaatcaacggtgtgttgatagagactaagatataattacaatacttaaagaataaaaatgcaattaagttttaaaataaaaaatctgaaaaaatgaataaaaaaataagggaaagcaagtatcatctatgccaataatttgagacatatggatgtcaatagtaaaaatatgtagattttatggaaacaaaaattgataatcgaagccttgagtggtggagtggtgactgagtggattccagaaaggtttgtgggtcttgcagcttctacttattttaaggcaggtaacaactaacaaactagcatcttgggcctcaatgtgtgtaaaatagtacgaattgttttgttttgcaccaaatcaccaattatattttccatttctaatttggggttcttatttagtacctctgacacttaaactattccttcttgctatgtcctctatttcgttcaactcctctacattatgctagccatgtctctcttttcttttatgtgggaacaaagttctctcactggctcattcaccttcatgcatcaacctctgttatatttttattccttctttcagttctctgtgttaagctcgtaggcccctttgcaaaaggcaacatatatttaggtgaatcggttgaatcacaaatagggtgtgattggacttcatttctattggcacaatgattgcttcgtgatattatacctcgagaaatgatctttgaattagctttgatgatgtggtaattagtcaaagttctatccggatgtggatatttgtgacccactcacactttactttggatgcgaaaagtgtttgttgggattaatgcatacagttgctattctactcttttggtattgtgatgctttaaatataagaaaaaatatatattttatactaattaaaaattataattaattataattagttacataaatcttaattaaaaattaatttttaatgtattatttattgaaactttatatccagaataaaaagaagttattaaaattaaaatctcaattaaataaagaatattttaaaaataataatattaaataagataaattaattaaaattttctttacaaaataaatattttttttatatttgagattgggtgaaatacatattatcaaagtcacatatagatgctctaggtttcagtattaaggtttggggataaacgatcaaatagggatgttttttttttctttattattatttggggatcaattttaaataattacccaaaaagaagtaagtcataatacatgttacgacttataattttttcaactaaagtcataaaatagtttatcatttcagtatatttttaaaaaaaatttatgactttaaagtcatacttatattattattttcttaaactaagatggtaaaatattttatgactccaatttaaatttttttgtttacgacttcaaagtcataagtaagtttttattacgactttaaagttggaattttttttatgacttctaagttgtaagaatttttttatttaaagttattttcaaatatttttaaaaaattgtaaataattttttaatttaattatttcataaataaatgcatttttatttttttttactttaatttaatattgttttttggtatatttatttttaatatatttcttgggtcgttgtgatttatagatcttaaatggaaacttgaatcctgcacctctcattttttttttaaaactcaacctaccccttctatcatcttccttccctttcttcttctttctcccacaatagcagtagcatacacacaaccccttccatttgttatcttcttcccatagcgcaatttgaacctcgctttccaattcttctcttctactccaactcaagtctttttcccgcaacaatcaatggttctagcgtagaagtgcctctcctagtccaactctcctcaccataagaacgttttctagaacaggctttctatataggaaaaaatagtttacaaaatgtccatttcgtaaggtacaaaatgtacttcccaaaagactattttggattgctgtttttgcttctgaaaaaggtttttcagaacgacccttgcagaagattataaaaaacttccaaaaatgatactccagagtgcacttgttgcttctagaatgggatttcaataaacccaataatatattttggaacccctttccggaatatcattcctgaaccttgtttttcttatggaaagctcgttctagaaggttttttggttatgaaatgtctagtttggaagcttttttttttggttatggagtggtcgttcttgaagctttttttgcttatggaaagactatctcaaaagtatttttttgttatggaatggccgttcagtaagctgtttaacagttaattaaatttgattttgttattttacaattttagttttagtttgtatggaggatgattactttaataacaagatgtctgatgaagttgacatggatatgaatgataccgttaaaaatgaatattgtagcaaattttttacaactacggaggtaattttttgatcaagtaccctttacttttggtattcttgaattcatcaaatatggctggttgagaaaagaaatgagaattcatcaagattcataatcatcagaatctgaatctatctcctcagaaaatttatcatttatcattgcactaggagcagatcgatatctaatagattgtaagaagttgaaataggcatacttaatgtcgaactgcatatcataccctgcataaagtataactaccatcaaattttttattaatattggacatggaacttaaaagggaaggcttggtccttacaataatttactgcaatagttaatcctccatcatccacaccctgtctaacatgatggaaccacatactaggcctacataaaggatactcaacaataagatggtagagaatttgaagtctgggttcattcccacttagaatacacttctttcaagttaacaatttgatacaatcaaaagaagcaaaaatcaaagttctcaaacaaggttgccaaaatattcccattaagttgaaagtacatgctacatcaggtcactcatgcaatgaggatgcttactcgttccttttttcttttctttttttttctttttctttttttaggggttggggatgaagggcagaaacacttaacatagaaaataccaccaaattcatgcattcactcgtgttgcatggaaaaaattgctagatagcaagcctcaataaatgttttatggttgagtagaagtttttttttttttttctgctgattgaccagaagtaattttatcaggacatggaaatacgtttgatgcatcaaatgcagaattttaatgtttactgtggccatgaaccattagcctatcagctataattcactcatttcattaaattgaagcaattaattaggcaactgattttattataaaaaatgatatgcaaatcatggaatgcaggaactgtgtcagaaaagaaaccagaaaaatatattattgaagcattcactaaaggtgattagtatgcatgccaaatatctttaagagagattattcaattaaactagtaaaatggatcacaatcactgcattcataaagttcagtaggcattagagaaaacagattaaccgaaaagctcaacgcatgagacggtgacctaatcacaggttcaaatttactatctcagatgataaagaatacccagtagaagaaataaagcatagcattaaaacacatgcatatgcaaaacaagggaatcttacaaatagagaacctcgccagccttcagttcacagtacattcaaacggcctagggccattgaaatacaggggaaacttggttatctcatcatccatggtctccagagaaggataaggatccacactgcaccaaggcacataccttgttggcttctcaagttccaaatcgaactctcctatatcctacaaaccacaacatccaaattaaatcaactccaaaaggcagcacttttaatagcaaaacccacaccccatcaacaagaaagaagaagaataaaaagaaagaaagaaagaaatacacaatttggttcaaagtaaatattaattatacttgatataatcctttaaaatttcagtttaaacaaaccagtctcctaatgattgatttaatcaaaagtagacaactttgctaagatgaaactgctcgagtttcaatctatacaaaattagttccaaaagatggaatttattagcagattgacaacttcagaacttgttagtaatttaacatataaatgacggaaacatatggcatgaaagtaacattgaatttatattttcttgaataaaaagatgatgggatgaaaataccgaagaatatgagtaagtggcagcagggtagtcacggatatacaagcgatgaacatcagtaggtggcaacaacaggaagtgtttttctccagtgacaacagcgtagagattctcgtagtgatcggtatggaacggggttcgggaatgctggttaccgatccaaaggttcacagcttcgggttcggagccaataacttcggtggcccaaccaaagtgagggtcacaatcatcagcaagagacgaatactcggagcgaaagcaatcattctgttgctgcgcgtaaccgactagcttggaagccgcggaagaggagatgaggtcaagggcgtgggggaagggcacccgcagcatgtgcgcggaggcgaagcagagggaggagcggagaggggcgagggcgtcggcggtgccggtgcgggtgaggtggacggagacggtggcgccggagagggattgggagaggtgggaagtgttggtccaggaagagagtgcgggctagtgcgtaatggcgttggagattatgcatggcttgtttggtgtgatgaagtctctcaggaactaaactggggttggtggagactctagtctatctactcttccgctgtttcccaaactcaaatccctcacttccctccatagttcctctatctcattctgctccttcatcttaattaacaactctcacttttttcaggaacaggtttctggagctttttatatgtaacgtggaatcaaatgatcacgtgaaaatcaaattaaaatgatccttgtatattatggatacatcttagttaattgaacctgatatgatacccaagtattgtaaatcttcttgtctgtctttgaatcttccgaacgacaccacaacacttccatcctaaactctatgggctcgtttttttgagagattaaaggagacaagtatagagtgcaaaaaatttaatgtaagcctagtgttggtcatgaaaaaatgtaaaccttttgtggaggtgatggtctttagtttttacaatttttgtgtgttgtattattacgttttgacaaattgccaaatcaaattgttatttggcagaatatacagacaatggcatgaaagcatttggatcatttgtgggggcaaagacaatctaaaatggattagacacaacaaattgtggaagaaaatgtattttgtaagagatttttgtcagctgcatgatatactagatacaagtttggttgtgaaataagcaaaagcttgacatttttaggatgcacatctaaatttatccgtggagtgcaatctctcaagtagaagctgtgtatttcccagttacttgaccgtttcaacattcaaggtgagtaggagtccattcattgacaatgacaaagggtggcaaactgggggttttgtcacaccatgtcgccacatggcttaaaattcaactagtttgtggttattttggtgccattcactaagttgtatgcttcgcagcgtgggatgtgctactcaccaatcaatggcaaagaaccaaccaatgcccttgatctccaagacatcttgagtccaactagcttccccatgcaactatgtaatgcaagtggtcatgaatgaaagccaccagtctttggccatgtcaactactcactgagtttgaggcaaatcctatttggcaatggccttgcaataagcccatccgtgacccagcctaccaattctccgtcattttttacatggttgaattccctttccacataatccagagatatatgtagcctcccaccaggtttggaatcattgagggttcgtcttccttcaattcctgcgttcttttctagccaataaagttaattgacctggaacaatgccttgagcatatcttactgtgaacagttttctttgagcacaacctgaaaaacaggaagatgcattattagatccacataatgtaacaccccaaattttggaaacagtcaattatgggaataaaatgttaactagagacagtacagaaagatttaaggaaaatgacgaaaatacccctggatattttggaaaatgaccaaaatacccctaggtcttccaacaatatatattgagaaggaaatcttataaatatccttaaggttgtagaaatgaccaagaatacctccagggaaacaattacagagatacctgaacatttttagaaatgacgattttacccctaaggtgaagggtaaaattaccaaaatacccttaggtcaaaaatgacccaaatgacttcagaaatttgtgggaacctgaggatgggataaaatactcttagacaacaaataatcaacatgattggtggcagagaatcataaactgtgatttttaggaattttggaaaataccttgaaaagagctcaatctagacaacctctggtatcataaaactataagaaaagagtaaatataatttatggagttttctcttaattatgggaggaataggttgcctagataagttagtttagtaattttaataattaaaatctaaatggaccaatgagaaaatgagattttaccattacatgtatttaaaggaaaattttgtaactttggctacaagaataagccttggccgtgtgatcaaggaagaaaagcaatatggaggccttcattaagagaataggacggatagactaagtcaaggagaagaaaaattcaaacccttgaccaatagaaatcaaggtagtaagatattttggggacaaaaggaatctttattaaactcttgggatttctatggttgtgaggtcaaaaggagtgtgctacaagctaaaatcacacatatacaacaaggaggagaaagaaatgtgtgaaacaagctactaggaaagatattattccttaagccaataaatattaaccaagtggaaagctagtcataaatgacttaagagatatttgaagcaaattttattttatctccattggccaaatacgtggatagctagaaacattatttctatgatcccaacggtcaaaagttagatatataagttaggagtataccattaaaattttaagaagatccgacggttaacgagttcagaatgaatatttttgtaacacgggttttgggaaaaaaattttatgactaagtctaagctacctatggttttgaataaaaatcaatgggaatgcttcttgagtaagctagaccacgtgtaattgagaagaaaagaggagaataatgtagaaacaagccacttggaagcaaataattctctagccaatcacaactaacctagtggaaagtgaaatgatggccttgagatatttggagacaaagagaatctttctaaaaacttctagctttctacatgaaatgaagtcaagagaagtcttccacaagataaaccaccgtgcaatcaagagaaaaagaagaaatgtgtaggataagccattaggagaaagtcaattaaccaaccaataaggagaaggcacaaggaaagtggtcatcatggcttaaagataatttgtaggaaaaaaatcaagattcactcttgtataaaaaggatttaggaaccgtgttggactgcaaaagaggagaataaccatgcaaaaataatagcctacacttcttgaccttttcaaagctttgattaaaacaatttcaaatcaaaacaagtagtagtcgtgctatagcatcctatttcactctcactttaaccttttccatctccttcaaaatatacctcttatctaaaagccaaaacaaggaccactcacttagagtcatacgtgaaaggccaaggtctaaggaggcaagaatttctaattttgagggaaacaaataaggtatggggaagtttatgatatgcttaatttgaatattacctacatgaagatttttatttgatttcataaaggaattaagctttgcatgttaagtgtttgatggaatgtttctaagaaccaaaaataaagattcttacttgatttcatgaagaattaggctttgtaggctaggtgtttgatgaaatgcctcaaagaaccaaaaattgctatatggatgattatttgatttagtaacttgattttagtattagaaacacttgtaaaataaataacttgaatctaacctaattaatgaaggctaaaatgatcaacaactgtctagaaataagtgtttaaagaagtataatgcttaatagaatatttagtacaaatatgtgatggattaaaggtattctaattccttaagttaaatatttaattaatgctaaaatcaaattgaatagttatttgcttttaatggtagtatgtaaatagtttctaaagtttagacgttttagtctgagtagtaaactgatatagtctattaaaataaatcccttgaagtgtattgattatgatattagaattatgttggaattatgattagtatgttgaactatttgagatatggtgaactaagatttattctgagaaatatatgaagtaaactgtggctgaatggattttattctgtctggcggggacataagaccgcgtgattttattctgtctggcgggaacataagaccgcgtgattttattctgtctggcggggacataagatcgtgttactttgtcctgtctggcggggacataagactgagatattatatatctgtgtggtgtatggctgatctgatgtgaactgtgtactgtgatgaggggatttgattaaggtgtggattatacttgtcgccatatagaccgtgtgatttattttaaagcctgaagggggcataggaccgtggtatttggtactgtgcagatgaattacttgataagtatgttatatgattgtgtgtggaataaatgatgtgatttaaactatgtgctttgttgatgtgtgctctgagtaaagtgtggatcatgcttgtttatttataactaatattataaccatgtgagtatttatttctttatgtatgttgtattcaaactatgtatgtcatgaacttaccctattttgtgtttgtggttgacacctgtgatgaccccaatttatttgggcgagcagatgaacagtagtagtcgagcatggatgttgggcgtgaagagatgcatggatgattgagtcaaagatgtgtgttttctattgtatggattattatatgtaatatggaccgtataatattttaatttgtattggtgtattgtattagtactgtggtgaggaaaatcgtttatgttatttacaaatcataaaattcacaagtaaagcaaaaaagaattttcgtgaaaaatttacaattaagatcattctagtaaaaaaaggacacaggtttttaattaaaatcaatcaagcacgagtgagtaagaggaggcgttacacataacacaatggcaaatatttcatttaagataacctttcaaattgggcaaaaagtaagcttgatgtaccgatttgctaatgcctcaaggggaaaaccatttgacaaataaaccacaacaatttttcagcctctatagcttttgatttttacttttggagaaagaaaagttacaagataaaaatgaattgtttagctttctgcctccaatcaattagctttgaaaaaatctccccctctaaagcttatacaaatacattaaacatgaatcaaatgagaaaagcacatcacccccaccacactttataggaagagaaaaaacaattcaatgaaaaggaaagttggttgtcaacttacagagtattttcccatgtgctctgacaagatgtagccttcatttttataaagcccaaagagggcatgcacatcttccttgctgttgacaatttcactgagcttggatccaagctgcagacgatgttcaatttctgcagctgcatcttttgcttcagatgataaagcaaatgattgtgcctattacaaaagtaaacaagccaaaatatataaaaattagattgtgcaaaacataataccaaccattctgacacttgttcatccttctaggaagcctaatcaattgatgttagaagggcatatatgatattatacttccaacaaatactaggaatttatagtgagttgagaagagcaaataacattattatagatagggcaagtctcatgctttaacttttatgtttaatacttccaagattcaacccaccttgacaagagaaatgaagaaggaatgacagtatcataagaacaatgaccatattaaaaccctaaacaattgcaaaagtaactttccaaacaaggtatcatcatagcaagggagagaaggacatgagaactgatactccccagcctgaactgagaagtgagaagtactattagaagaagccagaaagaatcttaaaattaccaaaccctgatcaaaataaataaatcagtctaattttagcaagcagcaaattttgaataaggaacacaggatctttgttcaaaggtttaattttcacaacttcaacacacgcaagattaattcactttgtttgcaaaagttgcatttaatacgggtacagctggaaatagtggctcctcatcattgaccactttaaccggaggtgcctagccacttagtagatattcactaaaaaccaaacttgtcaaaataatcaacgagacatataaaggtttgaccttttaacaaacaaatcaacccctagtagcatttcaagatttccaagtccccgtcccccaacccaacaatagattgcaaaaccaatcctaagactgctatttaattgcaacctacaagaacttccaatattttataacaaacttaaatctacacagaatagacaacatgtcagaatattcaatgtttcatcaatagtataaactataaagtgaactaattttccctaagaaaaatagagcacaactcccacatgattgagtttgagtggatgtgagagagagaacaaaaattacttgcacggtaaggatttaaagtccatagttgaatggactgatatgacttcagattgcagtacatgtggatccaggtcaagacagtaaatgaagcaagaacaagggttgtggaggagcctatgcagttacccagtcctataccgagccctataccaataaacctgcttgccattccttggacttcccctttagcaattacctacaatttacaattattttcagagaaaaagcagcataaataagtaaaacaaaggtgtcaaatgcatactcatgaatcatgccacttatagcactagatggattctaaactaagaaaacggaatgattattgtgttgcataattaacttaatgctcatatttaatatagaagaaaggatctacttttcacctcagcaaaattcctttgagcagcaaaaccagcaaagaaacagctcctggtagaagcttgtgaagaaaaatcagttcaaactttcaattatagttatcaacctcagatatcgaaacatagcaaccaactctaaaaatgctatagtgagaaagtaggatgcaggatgaccgttattttaaatggtatataacacaaactaaatggtatgaacaactgtgttactggggtataaaaatgggcttttgaaggttatatcatggtaacaccactatagcatgtgaaaagccgcaatggccacaattgaaaaccactccactatttgaatcccatagtggtctaagactactccaccataacatgctattgactactaaacaagcagatggaaaaaacccactaaagggtaggttagaacaatcactttacacatcttttttttttttttatcggcaaaagtatagatatattatatataatattatattcagtacaagtggtgttgatgtatatacatcctagaaacaaaagtagcaaaactatggtgtcctaatacatgataaacaacatgaattaggaaaccaaaggtctggctgtacccccctgggaatacaaaatccatccctgatgttgctagaccaagaatgaaatgggatgtcaaatcctttaataaagcatcctccatcaatttatgaccattgaaactttcatttaggaagacaatcttatttctatgatgtcaaatgcaccatgtcagagcgatccaccaagtctgccactgttgtaacctaagtccattaagatagtagtactttacacatatcattattatacttaaatatacttaatttcaatatgcttagtattcatttaacttttgtactcacccatcacaccagaaaaaccaaaatcgaatcatcatgtaagctacttaattctaaacaaaaagatttaaacttcaaagacatcgcaaatccttcacacactaaaaaacttgcatcacctgaatcaaagaagcagcagagcgagaggccccagcaactgcaccaatgagcacaaaaaactgaggacaagcaggagtacacatctccaagccaaaggcagcattctcaagaagatcagcgaacaatgtccaccctttagggttaacatcaaaatggtgaccaaagttagacaacatgatcttactaaggtacctaattccatccttgagcacccaattgatcgcagcagtagtgggaatagcccattttcccaatccaacggcttcatcagatgaacttcagccaatgaggaatttaggtcttctcgagactgtgatctcctactctgcagacacatctgacttctatgtggggaccagaaagcacccatgttgccaatgtgaaactgcatctgccctaaactgtttgaggaataactatgagagacattattagctgatgggtacaatgaggactccataagctcgatgccatcactgttgtcgccaagactatgccctagaccaaattggctttgttgtgaacttgcagtttttgggctcagaggcatctttagtcttccatcccctgcagtatcataggtgtaaattggatttcaaagtcagttctaaaataattactcatgtcaattatatacagaattcacaagctattttgagtcacaacttggtcatgatttacaaaatatgcacaaatcatccacataataatgaaaaatagagaacatacacatttgtgacaactacaagctttaagaattgatgagaacatgataaaaacaagtcacagtgatatccaagatatacaaatggatgttggtcactataccacatttaatagtaaaaactaaaaggacaacaaaacagaccaatttctaagcgtctcagaaaaactttaaacaagacagttcatctaataagtttttggattagtactaatcatatgtgtaaataaatagcttaccagagttcattggactccatcactggaaccgaaaaggagatggtatgttaagaacaaaatcaccagtaacactgttatgcctggaaatgggaagatattgcctccggaaaaaccttggcatccaattgccaatacatgacaaagcacaaagaagtagaataaaagaaagcaacaaaatgggcacaagaacaagaggatttatcttcatctggaaaaactccaagtcatgaagcacaaatctagtggaaaacagctttccagcttccaacaaggcaacaccaagtgtccaagtgatatttccagagccaacagttatctggttatcattaatgtgcaaaccctccctcacagaggcaatgtagggtgccctgaagcagtactgctcaataaagggctgcggagcaacacttctctttgcaacatcccacctcttctcacaaaaactcttaccctttgccataacatcatcatgcgtggcctcagaagtcaagttgaaaaacctatacataacgtaaaatccagaaatcacataaaagtgtccatacgggcgaggcagattatcacccaaagtgcaaggctgtgctccacaatcaagcccagcaccaagatcagtccattcaaacaaattcacatcaactttcgtgagcgcactcccagaccttgttttacggctttatgaagtccaatccttgtaaggtaagacgatcttgcatatctatgtccaccaagccgccctaccgagcccccccaattgggagcaccaacaggcaccaatggagttcctcccaaccctccattcccacctttcttactagaggaacaacgagaacacgagtattcctccctatacccatcctgcaagcaaggatgtttcaactcaaaattctcaccactacccacatccatattacccaatccaaactccttcctaaatagatacaccacagacttcccaaacattggaaacaaaaagaatgagctaaatttcagaacatttgaactctcaagcatttttttacaaaagaaaagggtggtatctattcaacattttttacagtgtcaatgtacaacattcttctaatatagttaattcatgattgagtacgtaatacttccacaagaaattcttaattttttaagcagagattcccggggctgcattccacctgcttggatctgatacagaaacttaacagcttcaatgtacaaattattctgcatgtaacccataagcatagcattccaacaatcaacctttctctcgtcccgactcatctcaaacactcgttttgcatctctcaacaacccacatcttccatacatggcaatcaaactacactgcacatagtgatccgagaccagcccacatttgatagcatcagcatgaacttgttcaccacatagttcttgattcagcatcatcctacatgccttgagaacactagaaaaagtaaagcagtccttcttcacctttcgcattcccatttgcttgaagtcaccaaaaacctcagagaaatgcctatccctgcaactgctaacgattttagctgtccaagtcaacgtgttatgtcgcgacaccccatagaagacaacactggcatcttccaggcacgtgaatctcccgtaaaagttgatcaaggagctgctgagaagcacatgatcacaagtacccaacttcaacaaccatccatgaatttgcattcctaaagggacattcacagtgcatgcacaagccctgagaaggcacgtccatatccatggaggaaattccaacatgcccaatttgcctaacatgtcgacaaaaacagccgtagcctcctcgtaatcagcattatcatagtacgcaacaaacagggttgcccaagtgttgaagtccctcacacgcattttgtcaaacatgtggcacgcattttccaacaaaccacatgacactaacatgatgaggatccgattaaggatgggcagtgggggtttgatgccgctattggagatgtgaatagccaactcaatggcggtttctgggtcgccgaaaacagtgcactcttttatgagagaggtgtagatgtcaatgggtacgggaaagggtagagcttccatcaggtgcaatatgtcagaggttgtggccccttttgtcttctttttcttcttcttcttcttcgtgaaagtagttgtttgaggaataaggggttgtgggaaagtgtggtttgggaagttctgtatgggttgcgcaagggtgatcgaagctcgagttgatggttgggagaaggcaaagtacatgggtttttgttccttaaatcaacattttcattgaagaataggtggtgagttggtaccgttggcaccggtgcagtgattagtaccatttttcacgtctacgacaacctgcgattcacactaggtacattttcttctaccataatactcttgaaccctaaattctaaacattgaaacaccacgaggtctgctattcacaccatgtaccatatttcacactatgtaccatttttcatgaaggtcacgatgaagcttgtaaggaccctcatttctgtgccttcatgaggtgttttagtctagaattgatggttagcaggtgaaaatagcagaattaagccgaacagaaggtatcgcgccaacaagcctatgtactatcgggggtacataggctaattctacatgtggcgccaggagtgccggtgtggcgccaggagcgccatcggtgctggaagttggcgccaggagcgccggtgtggcgccaagagcgccacaggtgctgaaagttggcgccaagagcgccggagtggctccaggggcgccagatgcactggaagctggcgccatcagcgccaaggtggcgccaagggcgccgcatgtcggtcaggggcaatatttaaggccaaaaatgtgaaaaggagaggaaaatcagcctttcttcttccttggacctccaaacctccattgatgaccttccaagcttttagggaccttagatactagctcaaacacttcctgatgacctttgtttgtgatataatcgattagaaagcttgaatcattcaattctactcttgaaaaaccccttttatgtgagaagtggaacctcagaggaaaagctcagagaacttatgatattattaatgataagagaagctcgaggaagctgtcctgaggtcttttgagtcgccactgaggtaagagactcaagtttctccgtttaattttgatcctgggggtttttatgaatagtgatacaatgagctggggctagaattagcccagggtcctgttgagagatgtgttcagagcgatgaattgatgaaggaatagctttcagtttttgatttagataactttggtttttggctctgtggtggcatgtgtaagttatactgagtcatttaatctgagacatgccagagcctttgtgatgggcttgagatgcctgataggccatggagacggtgtctggtgagatagaccgtccaagccctgagaaacccagaggacttgggtttttagagctgttgagctcactgttgttggtttggttgagtctggaatgactctgaggccatggatggatctgagatagaccactgagggtctatggaaaggcttgtagaggataagcctgatgaaccttaggtagaggacctgggttgatgggaaggactgtggttcctttcccagatgcagtggatgactgctatatgagcttgtgcaggtttgaagcttgtatggtctgtgatgtgtgcttgtatgccttggtagggcttgacacaaagggtgtcagaggagcaggccatcagcggaggctagagctaagaggcacggctagccaggtaagctcatcgttctggggttttcccttgttttggtttgtcaccctagtggggtgaagattgcatgctatgtttgaattatatatgtatgtatatgcatgcagttgaggagaaggtctatgtgacctgttatttgatattatatgtgttggaagccggaaaggctataagaacggtacttggagtgaaactcagaccgttctagaaagatgaatatatgatgaaccctaggatagacactgtgacagtgtgagggtaatgagacacctgatatggcaggtgtgagaccgtgtgccttttgagagaatgcagatcatgagatggtctgtgatggaaccttgaagatactggatgagtatcaggctagttgaggttccctagccagaggtagagtttgaggactccctggaatagctgagattccttgggaggtgccactgctctccacttaagtcctaaggacagatggaactgtgtggatgttcctccttaggtaaagaggttggaagtcctgagtggttatcctcaggccagtgtttgtgaaagtcctggagggtattcccaggccatatgcttgacagatatgttgtatctctaagagagggcttcccgaggggaactagagcctagggcctcttagatgagccatatctgtatcctcaaagtcctgagtggagggatctcctcaggcaatgtttgtatgattcagaggcggtgcctctcttgggttgtgaagtgtctagagaatgacacttatgataggtacctctgtgagacaggctatgagagcctagatgagatattgatgccatgttgatggctttgatctctgtgagacggctgagagagccaagaggaggtggaatacctctgatgctgagagcatccagttatggacccagatggctgggatgtgtgaaagctaggatattgtcctagtctttgtatgtgtgagctaggaagatttcctcagctctgtttatatgttgtgtttatgcttggtggtgaaccagggttagggaggattccagaaccctgagtttactgagacgtttgtctcaccctgtgtggggtttgtggttttcaggtgcttcttctggagcagaggagcgaccttaggacaggaggccctggtggagctgacaggctggagagagagctgcagtaggagaagaccgagcagagcttcaagagttgaagctggtctttggtctctgtggaattatagggtgtgtgtacacccatagtactgtacatatttatatgagaccggttgtggtcttatttttgagcatgtatatgtacagatgatgatgttgtataagagtatgttttcctcctgattatctctgtattgttttgtgtcctgcctgttgtgttatgtatgttttatctggatcagcaggggcatgttttatgttctttattatgtgattttatattccatgcataatgtaatcaagaaaaacgattctatcgcttccgcactgcgttcagataacgctgatagcgcgcttatgatattattaatgataacacgtccggggtgttacaaagcttgaatggacggcacaaagaagctggcttgaacggacgaagatcgcgaggccgaggcttgaagataaggtcaagtcgcgaggtgtgtgactcagtgactgtgtgggctacgctgcggatgaaactaaggaagaagaaaacctaaaaaatgcacaaagtgaaaccacgccgttttgctttaaaaaaaaggccaaattttaatggctacccctgggtccgcccctggaggtggcggtaggaggagagatcctggagagagagggggtggggagggaatgtgaattgggggagacgagtgatgcgattctagcaaagaccatggctttttgcaatttggggaatgcccagatggattggagaaagtggggttaggtggggggaggagaaagcatggcatttaggagagtgagattttagggggaaaggtttgggttgatcgccattaatgagaggagagagaaatggatctgagtctcgtaagctgctggcgttggttgggtggaatttggcgacgactttgatgaccaaaacttcaaagattagaaattaaaaaaacagaagaacgtatttgctaattctgcatccacgggatgctggtggcactggccgataggtccaaggagttatgttatcaccgactaaacttgaacttgcttgcacaccctttagaaacagtaacatgggtatagtgaaatttgtttgattgataagtatagttcatgataaaaatgtaaaatgaaaaaaagtaggtctgtctgatttaatattagtattttaatgataaactaatgacactttttttaattaattacattgaatgacatttcatattatttgactatctcattacttttaataataatttataatgtcgataattttaatattaattaaattttgatataaatggaaatttaaaaaatcaagtgttacaaaatgataataaagacatgtggttatgtaagtagtaactaataaccattaataaatatatatatacatgagttatcttactttaaaacttaacaattgaaaggtatattaaagtaagcaccattttttttaaaaattgacaattagaatataaaaacattcaaagcatagcccgtaaaaattactaagttaaagagttcaaatgttaattatctaaattttaaagaaaaataattaacgccaatataagttaaagaattcaattatcatttgttactttgcggatttaaggttgcttaaactcagttagggattgcctagtatttggtatagagcataatattataatcttataatattatgttatccctacacaatcaggagacattggtcaaagtgccacacttcaagaaaaaaattgccaaaatgccatggacccaaaagtatttgccaaactgccacgctacctaattcgttggtcacctcagcgaattaggtgtgctgacatggcgccacatgactggaagacctatttcgctggagagagaagcgaaataggtatgacatgtggcaagcgttgaaaattgcgtataaattttgaacggtcataacttttgactagaacgtccgatttcggtgaaatcggtggcgaaacgctcgaaattgagaggagaagccgctggaaaattcccaaatgggacttgctcaaattttttttccaaaagaggcctctaactgtctcaaaattaggatttaagattcaatcatccaaaaaaattatttttgtctacttttttaattatttggttacttaatttaatgttattttttactttttcaattacttctctgaattttgaacgttttgacttatcgcacgccttcatcggacatttctctcaaaaaatatcattgttcgaagtttatatgcattatcaattttatatcataacttttgagcaaaatgtccgatggaggcgtgcgatataggtcttctagtcatgtggcgccacgtcagcacacctaattcgctgaggtggctaacgaattaggtagtgtagcagtttgacaaatacttttgggtccgtggcattttggcaatctttttcttgatgtgtggcactttggccaatgtctccacaatcagaaactgcacaatagagtatgatataattctacaaatagcattaacattcttttgttgtcagaatagtacagaaaataagcaaaatacaatggcaaaagaacatcagggaagaaaacagaaaacgaaggaatattccactaatggcatccacaccttttaccccctgattttcagtaacatatactctccactcacttcctcaaccataatggcattttcctaattttgctactgcacctaatagaattactcaccaatctttcactaatgggatcaactgccacgtgtacaacatgtgactatgtccttttgctgcaatttttttttataatttttctttctatttttttagtttgaatgtgttttatgcatttatcaaaatttatttgcctttgccgtgttctctgaatctattcctttttgcgtatggcatgccactacctttggcagcattaacattaaagtataataaatgagaggtgggctaaagtgtttttcattttaatttcattgatcagcttgttattaagttttaagaaattcacctttctttggggttaatgttaaatcaacgaaaattataagggctatcacaatttcaggaagaaaaggaacataaaatatatagactcacattacaaaattgctctccaaattcagatacaacacattgtatttcaaaatgcagatataacatgacaacattcaaagtttgtcccgaaatacattgacatgatcaaacacaaatacagatttacctattgaaattattgaagaaatagatttgagaatcatgagaccaatttttacaattgaatatcatctaataactcatttccttaatccgatgatgactttggggatacgctagcggacaccgaaaaaacaagacctctctggtgtgcacttctttcatgaataagtggttcagagacccaagagctatgaggagtaactccaagagttgcttgtctttctctagaagatacccaagtaaccatatatagatcggcaatgataaaagatccgcctatgatgctgctgatgtgttgcaaacacatcttgtttttagtctagttttaggttagaatttaattaaatatgtaggaaaatagaataaaattagttaagtttagtaatttaattgttttaagcttattcaataccaattaagcatttgcaggccaaaaagaggagctcaagaacaagaaagaagaagccaagttctaaagtgccgcgcggatagcgcggtaagccgcgccagttacaggattgaagctgtaacctcgaaggtttcacgctatcagcgtggtaacccacgcgatcagcgtgaacaagccgcaagaatggcgccatcagcgtcgtaagccgcgccatcagcgccatcaacacaagccagaccaattgtttcgaccaagccacgcgagtcgcgcctactccgcgccactagcgtgagaagctctgcaacaaggctgaagattcgaacattccacgtggatagcgccgtaagtcacgccatcagcgccaagctttcgaacaggccacgcgaatcgcgcggaatcgcgcgctggtcgcgccaggattatttggttgcctgaattaaaagatttgcttcgaaattatcatgggctatgggcttacttactgtaatttaatggttctatatatattaggcctctgaacagagttaagggcatccttagacatccatagatagccagaatatatctgatttacattgagaaacatagttttagctttctaaaccttagaaatcaagattcaaagccagaattctgcacaactatgaagtattcatctgctttgatgttcttgaggcctatggttggctaattcttgtattgtggaaaggccatgaactgatgagttatcctctgtaatttgactggtattgaatgcatatgttttgattgttttaattcttttctgttcttatatttcatcttatttggaattgatcacttcaattaagtattgagggttaggatttgcaatgggaacgttggggttctaatttctgacctgttaagaataacattcgttcttcacctaggaatagggatgcgtgagtgcggagtttataatatcttctttacatgcttaaactgataagatttcactaaggaattaggttttcaattcagtttaaagggttgattcactaaggaattagggattagctaatattgaaaagacgtattctccgagcaatcataacacgaacccatatgatttattctcttaatgcttagtttgacagaatctgtaatatcttgaattttaagtatgtgattaacactggttaagcctaaattaagtacgtgttaagcttaggattaagcttatgatggaggaaatataattaggccttggaatcccttgaaaggaggcttaaaggcttgataaagagttgaaataggctgttctggcctgcggcgcgacccgcgtgaagtgcggcgcgacctgcgccataggtataaaacatgccaatgctgtctgccatcccgcgcgagtagcgtgggaacggcgcgagtagcgtgggaagtgccctagaaaaccatgttttcctctggagctccacgcgagtagcgtggatgttcacgcgagtagcgtggattggcagtgctgtggcgcgaccagcgcggtaactggcgcgagccgcgcgggatcgacggatttgcttttatatgaaaccttttgggcagagagggagagaaaaaagaaaaaggagaggagagaatagagagaaacctccattgatgagcgtttgagcttcgtaccttcttcatcgttcatctaaacacctccgacccaactgagaaagtgattagaaccccgagaggagagaaaacccccgattgattcttgagaatagctgagaaatagtgagattgatttctctgagagaacccttgagagctcggagtttaaagacgaaagaggccgtgattgagcaagttatcttagggaaagtgattccctagtgtttctgaacattacagaggtaagaaactcgagctctaaccattggttctgtgttttggatttcggggttttggggtaatcttgaggggtgttttggaggtgttagagccgttattaggctcggactctgtagagtcttatgctcagagaactgttctgaggaagttagagccttgaatcatcattattgatgaagtttgattttggctctgagtcagtctgagcagagataaaaggctagttatatgactagtatgaaccttaggacagttgacaaagttgctcatgagactatatagaggagattgatcggttgaaactggtgattgtgagaggttggttttaagcagaaatatgcttaaccatagcttgatcagatttttagtagagactctgtagcctgatataggctgagagggatcctgtggagggtcagatgagcacttagaaagtgattgtgttgtggttatgaaaggatgagagtttcctttcatttgaacggtttaggaccgtatttgatgtgttatatctgtattcttatgtaggacgtgagcctgatagctcaggtggtgttgaccacgggaccgggagagccggtgacttttccagagcaggtaagctcttggttcttgcttgtatgtccttactgtgttccaccatactcctaagggggtaatggttctgttgagctgttatgcctgtgtttggcatttgtgtattgctctgattgattgatgattgatgtttgtaccctatgagagggtaatggctatgatttgatctgtaatgcttgccatttgatctggatctagaaagagatgataatcgtgcatagttattgattgtttagcttatgatatgcatgattgattgtagaatcctatggtaataggatagatgacatgtatttgaaatgagtttcatgatggaggtcggcccggtatataggagtcctcctaacatttgttgtacctatatacttcggaggtgcctctaattgactttgataggtagtggtatccatcggaatcatgtagatattgatagatggtgatatccatcggaatcatatcagtattgatagatggagataaccatcggagtcatatcaatgttgatagataagataactatcggaatcacatagatcagtgatagatggtgataactatcggaatcacatagatcagtgctagatggttataactatcggaatcacttgataatgacagatgggtgttctttgactgcatatctgctgattgaacgagtatagatgttgacctggatgagtttctttggctgtgtatctgttgtcagtgaaccaggggaaggaaataccttcaagggctctgagtttactgagattttatatctcaccccttgtgtgggactatgttttgcaggtgattcttccagagtagcagagagatcccaaggcaagaggcctatgcaggattagctgctgttgaacatcctaggctagaggacttgagcatgttgctcagatattttgtattttttgggttggttggttttgatgtaccctgatggtatatttgtacagttttgtattgtacaatggaactttgatgtatattcaccatattatgatgtacagtgttatgatagtgactttgatgatgtcacttctagtttatgcttccaaattgcttaaactctgattaattaggtgtgtctattgtgattgatttggtaatgaccctgattaatggattggggcgttacagaatcgctaaaggtttagggttttcgatcgaattaaagggtgaaatcactagttatctagggtttacaactatagtagagatttatcatatgtgaacttgaaggtaataatccagtcaagtgaaagaggtaagactcagaaggaattgcgcctgaccacaattatcaatcacttggtaatttcttcaactgtttactgtttcttttaaattttgttttaatacaatcactcaaccaaacaactttctctcaacttaaattgtttttactttcaatcacaatcaattcatcattactgtggaattaatccaatccctgtggagacgatactcaacttacctaactttattacttgtaaacgatcggtgcacttgccgtaatcgcacaatagctgcctgataagttgataagatatagtaattttaggataaaataattaagaaaataaagataaaatatcaaataaagactttaaatagatagaaattatcttatcattagttattgttagtagttattgttattttgttatttaggagcaagaaaaggaagaaaagaagcaaaataagaagcaactgaaatccttagatcacgcggatcgcgccagggcaacgttgattgcgccaaacctactgcaagtccacgcgaatcgcctcaaattcgcgcggatcgcgccacaagtactgcatgttcacgctatctgcgtgaaactgacgctaatagcgcggacgctacgagaaattcaaaaataagcttaaagataagataagaagataagctcttggggttttgctaacctatctataaatagggaagccacataacctttgaggcacgacttttcatatgcagagacacttagaaacacaaatatacacacacggaggctgaagaacgcattaaggatggagaagaaagtcaagattgaggggtttgattattcttctattttgtattctgtctcatctattttctcatatttatattgagctagacataattatgtctagctaattcctccttgattgtggtaaaggccaaaagccaatgtgaactcttgtgtggattggattgatgattaatgaatattgttatgattgcttctctttattttgttcttcaattttaaattccattgatagaattgatcactctattagaggtactaagggctataattcacaatagggatattggggttttagtttctgaaagcaataaagagacagtttgacattacctagggatagggatgaaggattgcaaagttttcatatgccagcttaaagcttaatctgaaagggggttactaagggattaggacacttaattaggattaaagggttaaaatggccgaggaatctgggtttaaccaattaatgaaggtatatctttgagtaatataataattaaaattaattatcagttcaattaatcaagtagggatcaaaggtgtttgtgcttttaccgcaattattcttcattctgcataactttcaatttaattctgttttcaattattttccaaaatacaacacaaatcacaaatcaattctctttctatttttattccttccaattttaagataacaattacaattactttagtgcctcaatcctcgtggagacgatactctacttactaaatttattacttgaacgatcggtacacttaccgtgagttacgcatcacactttgtgacgcaacactgcccttataacgactacgtttcttattcgtatttaattgattacgcttgttaatttttacggaaaattttttttctacataattttgtttacgtaaaattaattatacgtaatactttatttttctaacgcgttcgcaaaattgtcaaaacatacggttcaattataatttaagatacagtttggatacaacacagtcccaaatagtctgtttaaacataaaatacatatagcatagcatagtatcaaatacagacaaacagaaaatcacaaataaagcttatagtcatccaacagcacacagaacatccagcttcttcctgaatgctttcctcagctcactgttcttctgctcacccaaataaattggggtcatcacaggtgtcaaaccacagacacaactcgggtaagtatttaataaacatgattagataatcgacagaaattgaaataacattacagataaataacgaatgaattattatttataaacagaaccagattcatgaaaatgatgcatgatttcttgttaaatgatgcatgactgagatctcagattatcaccacagagtaccataagcaaaatagtttcacccattctagtgaaacctccctccactctgaggggtcaaagggtaccattatcaaaatagtttcacccactctagtgaaacctccctccactctgagaggtcaaatgaaaatgatgcatggtttgatttttctttcagttcctctttttcattaatttatttctcaaagtctcatatcttggcactataaatttttaattatccatcaatatcagagataagggcccacaaatttttaaggaactattcttaacaatatatgatacaaatctttaatcataagtccatgacctaatttctaatagaacagaccatagaaactttatcatagctcaacatcaattgaataataacaaacaacatcatcaagttacaaaattaatctacagcaacataagagaataacatacaacaatcattaagttacaaattaataaacaacaacataataaaataacatacagcaacattaagttacagaattaatttacagcaacataataatttaacatacaacagcataagttacagagttaatttacagcaacataataaattaacatacagcaaccattaagttatagaattaattttacaacaacatgataaattaacatacagcatcctttaatttacagaattaatttacagcaacaaataaaaggatacagcaaagtaatcttatggccacaaaatttaaatggttaagttaattagttacttccttattaatctaaattaataaatttttaggttggttaaaattacttatccaaattataacttatgtaccatagtaattcattgtgacattttaacaaacacttggtgtgcctaacttatgtcttgtattaataaatgataacatggattaaatcatgtagaactaaaggatagcatattctaatcaattatctaagccataagtatcaaatactccccataccttagctttccttggttagaatttgactacttgtcttcaaaggctcctagctttttcacgtgaccttgctttatgtgtgacctttgtttggcttttgtttttttaggtgacaagaagatggctgaatggagatttggtccgtgcaaaactctgccccactttggtccccattagcttttatattgctaagtttcttggcttttagggaaaaatctcaagcttataattacattccttttttgttggttcattcttattggtctttgttttcctaccatacaagtgtctttgatcatgatttttctatacctttctccttgtttctagcttggtccgtgaaatttcataagtgtaggtgccttgctttttgatttttaatcttttacgtagatggctttggtcttttgggatatttgttgcattattgctaaagttattttccacttgatccaatggtcttctttcttgtttcttggctgtccatgtgtccttattctcaatatttttttaccttattctcaaatttctacagccttctttatccttctctaatctacacggccaatctaaaattttgaagtaaatatgtttaatttgagctttatggcctacaccgtgagataaatatgttttaggggttttaatgctttatttccttaacatattttcttataaatatttctataatttatggaagcttagttttaattgttttattgaaagtactaatttctaaaattggttaaaaactagattaggttgtagtatattttagtaatcaatttttgagatgtttcttaacttccttttaatgacttttctaaattcctattggttaattttgtttttatttagtaaaatgtataaaccatttatttaagaattcattccttctataattaaaagaaaattctccagattgcatctttcctgtttctgtgtttttgtcaaactcagattagtctgtatttcattctttttgagttatctttcaaaatttctaaaaattcttatttcatagttttctttactaaaaatgtcactaattttctatttaggagcatactagacttttgtcaagcttccataaccttactgaggttttctggctttatcagagctaaaaggatattttggtcatttgggtaaatgttcaggggcattttagtctttttccctagggacctaactgtcatttgtgaaattgttcaaggacattttggtcattttcaaaagtgtccgggggtatttatgtcatttatttagaaatgcaaatttaccagaaaatgcacagatatattgaaatctgagggtgttacagccctcgcatggatgtaaaaagaacaaaaaaagataaataagaaacttctaaattaattttaaattgccatgcttaagaaagagaggaactttcttaagctcaactacatcacttgttccaaaacaaaaacgggtggattgcagtttttctctctcttttaaaacaaattcttggtgagtacgattgtagtcattttaagttagaatagaaatgcatcaacaactggaaataataataggagttttcccttcccaagtaaattggatttccaaggaaaatttgggagaggatggcagaaaacgcaggttgaagcggattgtaaagggcaaccatggctggccctatgatcttgttgcaccatgtaatgagtccatagttaagggcagatgcaatagttccctgaacaaataaggaaaatatttgtcaaaatctacatgttacaaaactaccaaaacaatttactagaagataaatctattaaaacagttgtaaggacataggatatttcaatcatttcaagttttaaaatttagaaaaacaaaaaaactctgctttactccagtagttttccttcccctgttgaccacctaccagcatattacctaaaaacaattttcattgacatattgatgtcctcttgtactttcgtgcatgattgcaagtcattcttaccctcaattaacagttgcttcactaaacagagcaaatcgttgaaccataacagcaaaatacatcttatcctcaactactgttgcccctaggtaaaaacagttttgtggtttatgactttatgctggaaggttacccgataattttagttgcttaggtaacaaatggtggcctttctatggttgtcttacagatttgtggatttcttttaatactgtcgtgcatgacagtagctaaaaatcattaccaaaacagaacaataatcagcacatatacatcacaaacatttgtcctcatctaatccctgaatatttgttctttgctttttgattaatacctacatgttagtaacttaacaaagggataaaatatgaataaaatagacacataaaatagcataaagtagcactaattattatgtatgaacaatggctcgatatttgtgatgcatcacatttgagccaatatcaactgtacaagatgtcaataaaaaaggcttttaatatgaatgaacaaaatatgaacaaatatttgaattgctttaagtttttcacaattagtaaaagtataaataaattgaggaatgcttaagaagttaaatattcccatcaatcatcaaatgtaacatagaataagcacaagtactgttcgctgaaggtagcagatcgatgagttacaagttacaatagaaatagatttagaattgaaattaaaaactaaagttgaatagagtaaatataatccattgtcagtgtaaaactctttataatgccaaacaaaggattttcttcctgtgaaacctttttaacaatttttaaacaagtgacaccaaatagttttgaaaaatagttaaacttgtatcaaaatcaaatccaaaattaaaacccaaaactaagataactttgtaaaaccacatgcaatggcaagctaaaacagaacatttttagcatttcaaggctgctgtactaaagaaataaaaaaaatctttataaactcctatagtattaaaaaaaatttgagggagattcacacgccacctctaatcacaataaagaaacaaccttttgttccaaatttttccaatttccgtaatactaattaatagtagtgccccaaaacatcaaaaactttggttaacaaagtagaaccattacaacattgactcccacttcaacaaagtgagaatgctttcctttatcaaacagacaacagttaataatgaatcactgatgtgttaaattttaaaaatgcaaacaataaaaatgggtcaagtttagatgacagctccaataattcaatgtagtaagtagaccaaaatcatcagcaataactaataaggacttttgagaccgaagataggttaaaaattttagtgactcacagcataaataacagcaagtatttctgatgacgtcaaactccagtcagttgactcagtcgtcatgaataatgatactgccaccatcagtaaagctccaaagaagtatgaacacgctgtgacagataggtttgcaggatatttttttaataccgatgcctgaaaataattaatggcaataaattcaacacaataaaaatttcaaatattaaacatcctaagataacaatgaatggattgattaagtttagaaatgagaactactaatctgatcaacgaagagatttaaaatgagtagggaagtgaaacattttcattgaaagaattaggatatgcaagaagtgtttacaatagaagcaattaggaaattacaactacggtctacactcttcaatctaaatcatgagacaaaagacgaagttggagtgtcgagaactaaaacagaatcgcaagccttttatccatggggtaagagaaaatgatgattcctaataagcaagaacgttcagtaattccagcatcccaggtgaatggcacatagaagttggccataataaatgggtaaccgaggcaaaatgtgacattgatcactaaatgggtacagtcacttaatgcatatgacaaaaagatacatacctgaatggctagaaatgcagccatgcaaatgcagtgccctatcaagcacaaaactccaagatgaaaattgtcgaacccaaggttctgtaagccaccaattaaccatctagatggctctggctgacctctcgcccttatttcatattgtgttacatgaccaagttcagcatatcctatcaaagctggaccacgatacaaaaccataaatatggccccagagacacatataatagttcctccaacttttgccagaccatcacatctgagtaagttcactctttctatactgcatgaaaaggtttatacagatacatattactgtatgtcccagtgtatctgaataagtttattaatatatacatttctgcactgcaagtgagtgcgttcctttgtgttttgagttctaggatacacacacatagaacttgaaattgataaatgatacaagtgaaatgataccccatcattacagccaacagaaaggtaaagactagaatggacggctgtatggcagccgcataagttggattagtatagcttaaaccaataagaaacaaaagctggttgccaaatatcctgatcatgaatcaagaagtaaagttaccacatgcatcaataaaacactgtatctttcatacgtagtggaaataggaaataagtagtatcaagagcctcacccagttaatccaagaaagaagaatgaaatcaggaggttcttagtaatgagtggttgaatccgtctacagtcaacatgatatgattaagatatccattcaattgagagagagagagagagagaaaaaaaaataaaagggaataatatgacaaaacataagagggaacaaaaaagttgcaagttaaaattctagagcaggaatatatgctgctactcccataatcaaaattagcaaccatccttttatgttataataataatgggactctggaacaccattcattagccacaaacacacatcagcatttctaaaaccatatttaaaaatataattaaattaaatacctcaacaaacccatgtaaatcacgtaaacatagactcatagagcgttgcaaacatcaccaaccaacaaaggcaacaaccctccaaagtccaaattgtggaacaaaaaaaggtatttaagcatccaattccaacaaaaactgtcttcgtatgttcacctacaaagacagttttggtagaaaccgtcttcttatcttcttttacgaaaaaaaataaaatagggaatcaaagacgattcttccaaaaacagtcttcttttcttctattacaaaaaaaaaattaacaaaataggaaaacaaagacggttattacgtaaaccatcttcgtatgtgcgcatacaaagacggtttttggagtaatcgtcttcttaacttcttgaagaaaaaaacaaaataggaaaacaaagacgattcttcaaaaaaccgtcttcgtatgctcccctacaaagacggttttggcagaaaccgtcttcttatcttctattaaaaaaataaaaaaactcaacaggtgatacgaagacggttgttccaaaaaccgtctttgtatgttcaaaggagagaatccatttcaattgtatgttgaaagccgtctttgtatgttgaaagccaaaggcaaaggtgtgagggatgaatccatttcaattgcatccaaaggagagaaacaaaagaacaaaaggggaaaaggagcatacttttcacggacataagcgaggggtgagaggatggaaagggcaaggagatcacgaaggacacagaagactaattggttgatgccgacattaagggccactttggtgatgacatggtaacctccattgaatagctgaacaaacgccatggcaacatgggccttccatatttctcctccattgcccctgtcactgctgccattggaatcaatctgcaacacaatgttgcgtactcggcaagtgcaccgatcgtacaagtaataaagtgataagaaaagatatcgtcccacgaggattgtttgaccaattaaactataaattgtattgataggtcggaagacaaataattttgataaagtgttgttgtgtgtgtgtaataattaaattaaaagccaactatgaacataaagtattatagacaagtgattaagagtgtaccaatgtgtaaactaatgtagtcagggcaacccacactcaacgctcccatcattcttacatggattgtttactacattcatctataccagttactcaattcatgcatcctcattcaataatagttaagccctaatcccttagcgacattaaccctttagcctacttaagtgccctaattccttagtagcatttattaggttaagcattaaatgatgcattaagaaggattgcaagcatacatctccatccttagacaatgtaaagcttgtcactttacctaagtccaagcatagaatctcaatattcctattgcaaaccctagctttcagtacccaactagattgatcagttctagcaagatataaacatacattcaagcagagtaaagtgaaataacttggcataaatgaacaatatcattcaatacaatccaaatgaagattacattgagtgtttggccctaactacaaaataaaactagccaaacctagtcacggatggccttggcacaacaaaaagaagcatgctctgttgatatgcaagcaaggagaggagaagaaaaggaagaatcccactttcaatcacacccaagccttagaatcagcttccaagctctcttttctcttcctttggtgatttttccttcccaaaagtccctaaaccagaagtggcgctgctatttatacttggggaagtgaaatcccaagtttagcccttgacagctttgtaaatctgcagaatttaggtctggtgtggatcgcgcggtgtgtggcactgatagcgtggctattttgactctggcgctgaccgcgtgggaagtggcgctgatcgcgccaacttcattcttcaactgatacatcttctcgtgctgttcgcactggttttggcactaatcatgccaaaaaccagaggatactttccagagcagccactacgcggatcgcgctggctatggcgccaaatgaagattatggcgctgatagcgctgcaggtggcgcgagtcacgccaacttctaaggaagatgctatttccagggcagcactcacgctatcagcgcggatcttcatgcggatggcgccatttgagcccagctggcgctggtagcgctgtgattggcgctgatcgcgccacaacttctcttcttcttctcttttgcccaaattcacctgctaatcacttcaatttgaccaaaatatatcattgaggtaattttgtcacattcacactaattggaagcttttatcatgaattttgatgcatttaattgagcttgaaaacatcatgtgctaggcacatatcaaacaattcccagatttgaacattgctgtcctcagcaataacaaagatcttgaactagggatcaaggacaaacattaaatcctagcatcacagaagaaatcatagaatccaaaattgctacacacaactgagcttttgtattaaacttcaacaatgtttttcaatttcatcataaacataatccagcttgaacaccctcactagataaaattcactcatcactcaagtgtctagggtgcaatcaaagtcactctcaatctctacagccagaacactgccataggcttgaccatattctcaatttacctaagaaaatataacacatgcacacttgatcaaaatgactttcatggttgtaacttggcttggctgaagggtggacatatttggaaagtgactaaacaattattgagattgaaatagcatcaacttttccattcattcagatttccattctaaatttcattccactacctctctttagcattttatttttcttttgtacttccctttatcttgtcctgactcctttttctttcctttttaattgcagatcctttttgatttttctttcatttttaacacttttcacctgaattcttttcttttatccacaaatcatgtttgcattccaatctcaactaaggtgagtcatgacagtggtttacagaaatttgtttatcaggtgtttaaacaattaggtcttaggctcaaaggggggttaacaagggattattattttcagggaaggctatttggctcaagcttaaaagaataaatttgcctttatcacatcatgtatgcatgcatcagagagaaacagggcaagttctagagtgttactactgtaagaactctctaaaaaaaaattctgtatgggcacaattctcacaggctatagtatcaagctagatttgttgattccaaatcaaacatcatatacattctaacaatcacttcaatcatgtaataattccagattccaatcattattcatgcaatgtaattctcaaatgttcttatcacaatttccctattctcaatcaagttttcactgattcagcttcgtaattctgggtcatgcttttatcaaagtgtctaatatgtactcctatagtttaagttaggaattagacagtaagttacttatccacaaaaataatttttgactccaaaaagaatttcagacgtcctttgttctcaacatcactgctttcctcaattaacacatacccccaattcccaaatttaatatttgatgtccccagcaaataattaacggctaggtattgaaagaaacaaaataagtaggcgttatttgaggacacaagataacacggaacatcagtctaatagttatcccaaaaacatgtaccaaggttcaatgcaaaaatcaacaaaaactgataaatgaaacaaagtgcaacagagctaaccacagagctcagcaaaaaaaaaagtactgataagtctaaaatgcagaaataaaagtaaatgtaaataaaaacatagaaacagtaaataaaatgcagcagcaacatcactcctcagccataggatctgcatctggatgcgactggtggctttgggggtctgctgcaggtgctggtggtgatggatggctctctggtggtggaatagaaagtggtgctgacagatactgcgactggtacgcactggtatctatggacaggtggcggcagatgtcctcaaccatgcgagtcaggtaggcgccctggatgtgcagcatctggacctctgcctatagatggaggtagctgggagaatcctcgaacaagggctcctgatgatgtggtctatgctgagtggaggtgcctgtctgcggaggtggaaaaggagagtggacagcctgaggtgggggagaatggtcagggatctcggcatgctcctgaggcatctgacgagggctccgagcgtccatctactctggagtcatcttggacgctcacaaaagatgctccttcaccacattcttcttagaatcggcgtatgtctgcggggtcatcggagtagctaccgggacatccataggctcatcatcagggattatgactccagcacgccgacacagatgaaggatgagggaggagtgtgctagaagggagcggatcatgtggatgatcctgtcaaacaaagccctagaaatgttgaggttcatgtccctcatcagcacaaatagcagggttgccctctccactttcacattggtcaggttagtctatggaatgactgtgtggttaacgaattgatgccaaaactccgcttcccctgtgaggtcttgcctcctcagcttctccggcacccaatccgacctagtctttgtcttccaagccgtgaaccgactggtgatgccatgcctcagctcatcagtcgtttgaggcatatcatcccggtacacgctcttacgtgtgccaggaatgggctgcatgatgttatagagaaccgcgaaccgaaagtgcccattaatgttatgggatgtccccaagaagtcttcaatggcttagtaataaaaggggactctgactccacaaacccagctgaccctgttggcctccacggtgtctctgttaacattagccaaaaactccttgaggatggagctggagcttggctctacaaaggtgaccaaggtctgccactgtctctagataatcacctgtctgatgggtgagtgtttggggaatgattcccagaggatccacttctcagaaataatcttcttaggcaagtaccacttgaggaagcgatcctcagcctcctgagatctgaacctgccatcatcaaagcctgagatcctgggcctcttgctgctgggggtggcagagctctttttcttcttgcccttatcgacttgcttgccctgaaattcacagaccaaaatccaacacagcatatgtttaacaaatgtacaaaacagattatggcccaaggggaattcccagatttagatgaggctatgtcactgtggaattgatctcaataaaacactaagagtttatccaacagtgacaacaaatggaacagttaacaagccacatggtaatgaacacaacaagggtgaagcgcacattcattcaaataacatattgtgcatactagaccatagctatgattcccagatttatgtgaaatcatattgtggacaataaagtgtacaacattcccaaggatatcagctattgaaccacaagcaaggcacccaaaattgattgatgagcaggaaacttcaagtttaggataatggtgataaaaagttgaacaaacaagtgcacaagccaacttgatcacttacaccttcaacagggaattgtaaaacttgaattcaacaatgactcacaccagtatccatgtcatgccaaacagatgcaatgagtgaaacacattaaaacaatgtaactgggtcatgcacttgaattcaaaaacaacttacatcatcatcaaggcaaacaaaatagattcattgatggaagcacattgaggcactaagaacaaaccatagtacaagagcaattgtaagattgatttcatacaacaattcatacccactatctcagaatatgttagtctatttaagcattcaaggccatctcacaatcacagaagtatcaccagagaacaacaagattgaactatcttacttcaagccaattcgcagatttagactcaacaatggggtagcagcaattatgttccatgtaatcaaagcatacaaagcatatttactctaatatacagaaacaaacctatgatactgaccaccaaaggaactgataacagttcaaccacttacattggcaatttaaataacaaagcatgtgagcaataatcaaaacatacagccaagtcatgcacagacccatgtaataccccaagtatacagcaacaacactcaaataatcaaacatagagtagccccataacccacagtcaacagaacaagaaaacctagctgacgcgactcgcgctgaatgccacgctggtcccgcgagctgggttcgtgtcctaagatacccaattcaaatgctgcctctcccaacacccaaaatcattcaacgaaagcacattagggtctaggaatgcagatagagccttaccttatcaccagccatggagggaatgaatgaaaaacaagaaggagtgtagcggtgtcccaacgcgaaagaaaagcgcagcaaagggaatgagagggttgagaaggagatggaaatccctaaggctttaagctgtgatgaatgacagttgtggttgaaggtttttggcagtcttggtaacggaaaggagttgaaggaaggtggcagcagttttggaatgaggagaggcaagtaaggcgctctgattttttttaattttaaaactgttcgcgaaattcctcgctgatcgcgccaactaccacgcgaaccgcgccacttcaattcctttggcactggcagcaccaaaatcaccgcggaatgcaccagattccagacaatctccactttccagaccaacattggcgctactcgcgccgcatatcgcgctaactgcgtcagtcagttgccactaaacccaggtggcgcggacagcgccaaatgtggcgctggtcgcgccagaaaccagagagattgcaaaaaggagagcaatactagtgctaaccgcgccataagccgcgctagtcacgccagtttccagagaaaataataaatggagggcactattggcgctaatcgcgctacaaatcccagctggcgctggtagcgctagacgtggcgttgatcgcgccagactcttaccccagactcaaacttgcctgaatctcattcaaatgctcaacaaccctcaaaatatcctatctaaacttgactttaagaaaaacgcagaaataataacaaggaacaacataaagaacaattcctatgcattgaggaaaaacacaaaacaagcacaacaataagcacaattaaagaaacacaattgagttgcctctcaacaagcgcttgtttaacgtcgcgagcctgacggttaatcctcaaggattaggggagctcaaagggattgcaacaacatccctatcaatctgaccaccaaaatatggcttcagccgccatccattgaccttaaatggtctattggtgtgaagaggagagatttcaatggtcccgtaaggaaaaaccttgacaaccacaaagggtccagaccatcttgatttaagcttaccaggaaacagccgcaaccttgagttatacaacaatacctgctgccccggttcaaactctttggggtgaattttcttgtcatgccactttttagtcctttctttgtatagcttggcattttcataagctgcaattctaaactcatccaattcattcaattgtaataaacgcttttcatgagctttggtgagttcaaaatttaaaaacttagtggcccaaatggccctatgctcaagctcaacgggaaggtggcaagacttaccatacaccaactgaaatggtgacatacctattggcgttttgaatgccgttctgtaggcccaaattgcgtcatctagcttcttggaccaatcctttcgtgagttcccaacagttttctacaaaattctcttcagctctctgttggagatctcgacttggccactggtttgtggatggtatggtgtggccaccttgtgtgtgactccatatttggcaagcagtccttcaatttgtttgttgcaaaagtgtgttcctccatcactgatgattgccctgggaactccaaagcgtgtgaaaatattcttccttaagaaggcgaacaccacccttgcatcatttgtaggcaaggctactgcttcaacccattttgagacataatccacaaccaccaagatgtattggttggagtatgacttgggaaatggtcccatgaagtcaatcccccaaacatcaaacggctccacttctagaatgctgttgagaggcatctcatctttacgggagatattacccgttctttgacaccaatcacacctctcaacaaagactctagcgtccttgaagatggttggccaataatagccactttgtagcaccttgtgaactgttctatttcctccgaagtgacctccatagtctgagggatggcaatgccacaacaccttgggtacttcgaactcagcgatacacctacgaataacaccgtcaacacattgaaaatataagaagggattgtcccaatagtacctcctggcatcatataggaatttcttcttctgctgctatgtaagatcttcagggactactccggctgctttgaagttcgccatgtctgcgaaccacggtccactcgtaacggacatcacttgttcatcaggaaatgcatcattgatctctagttgtggactatcttggagttctttctcttggattcttgatagatggtcagccactctgttttctacacctgccttgtctctaatctccaaatcaaattcctgaaataggatcatccacctcaacaagcgtgggttggcatccttcttagtcaacaagtacttcagggtagcatggttataacgactatgtttcttgttcgttttaattgattttgcttattaattttacagaaaaaaaaattctatgtaatttcgtttacgtaaaatgaattatacgtaataatttatttttctaacgcgttcgccaaattgtcaaaatatatggttcaaatataattttagatacagtccaaatacaacacagtcccaaatagtctgttataacataagatacagataactcagcgtagtatcaaatacagataaatagaaaatcacaaataaagcatacagtcatccaacagcacacagaacatccagctccttccttaaggctttcctcagcttactgttcttctactcacccaaatagattggggtcatcacaggtgtcaaaccacagacacaactcgggtaagtatttaataaacatgattagataatcgacagaaattgaaataacatcacagacaattaacgaataaatcatcatttataaacagaaccagattcttgataaatgatgcatgatttctttgttaaatgatgcatgactgagatctcagattatcaccacagagtaccataagcaaaatagtttcacccactctagtgaaatctccctccactctgaggggtcaaatgaaaatgatgcatggtttgatttttttctttcagttcctctttaccattaatttatttgtcaaagtctcatatcttggcaccataaattttttaatcatccatcaatatcaaagatataagtgtccacaattttcttaaggaactaatcttaacaatatataatacaaatctttaatcatatatccatgatttaatttctaatagaatagatcatagaaactttatcatagctcaacatcaagtgaataataaaataacatacaacaacattaagttacaaaattaatatacagcaacataataaattaacatacaacaatcattagttacaaaattaatatacagcaacaaaataacatacatcaatcattaagttacaaaattaatatacagcaacataataaaataacgtacaacaacatttagttacagaattcatttacagcaacttaataaattaacatacagcaaccattaagttacataattaatttacagcaacataataaattatcatacagcaatcattagttgtaaaattaatatacagcaaccttaagtaataaattacaattgttacagcatcaaataaaaggatacagcaaggtaatccatggccacaaaatttaaatagttaagttaattagttacttccttattattctaaattaattaatttttaggttagttaaaattatttatccaaattataactcatgtattatagtaattcattgtgacattttagcaaacatatggtataccaaattttaaagcttacaaaataagaaagaacatagcttaattctaaagaaatagatgttaaattgacctatcaatcatctaattcatgtgtattaaattacttcccataccttgcttctttgattttgaaattcagcaagtggtcctaagccttcctaatctttacgtgaagctttcaaggggtggccttttgtgttttgcttttatttagtgaaggaataagtgaaaaggatgtgtggaaggtggggttgctgtccgtgaattgtttgggctgttatggctttgtttttttttttttcaaagttgaaaaggatgttggctgaatggttgtttgtccgtgcaaattcaactccttcatttggtcccaccatgcttttatataggttgttttcctttgcttaagtgaaaaatatcacaaagcctcatcatttctagcctttttggttggtccaatcagatttccctttgcttcccaaccgtccaagtggcttgcttcatcattttctacagccttctacctccttctatgtagtgcacggccaattttgttttgtggagctaatatgtttcaattttgggcttttatgatccaaaccgtagaatagcttatattataggtttttaatgctttattttcttaacatatttttcttatgttagtcataagtatttctataatttatgaaagcttaatttcaattgttttcttggaagtaaaatttctaaaattacttagaaactagcttaagttctagtaataattttggaatatttcttaacttccttataatgatttttctaaatttctattggttgtttttgtttttaattagtaaaatgtatagaccatttatttaagaatccattccttctataattaaaagaaaattctccagattgcatctttcctgtttctgtgtttttgtaaaactcagattagtctgtattccattcttttttgagttatttttcaaaatttctaaaaattctatttcagagtttttctttactaagaatgtcaataattctttgtctagaagcctactagacttttgtcaagtttccataattttactgaggttttctgactttatcagagctaaaagggtattttggtcatttgtataattgttcgggggcattttagtcatttaccctagggacctaactgtcatttgggaaattgtctaaggacattttagtcatttccaaaagtatctaagggtatttatgtcattcattttaggaatgcagatttaccagaaaatgcacatatatattgtaatttgagggtgttacaatggtcagtataaacaataactttagacccaattaagtaagactgaaacttgtccaaagcataaactactgctagcatttctttttttgttgtagcataattcacttgagcttcacttagaattttgctagcatagtaaatgacatgcaacagtttgttcttacgttgacctaacacaacccctatagcatatgcactagcatcacacataagctcaaatggtaaactccaatcaggggcagtcagaacaggtgcagtggtcaatttttctttaagcacattaaaagcattcaaacaattagcaacaaagttaaatccagagtctttggccaacaattggctaagaggcttagctattttagaaaaatctttaatgaatcacctatagaaccccgcatggcctagaaaactacgcacaccattgacattagtgggtggaggcaatttctcaattagcaaaagcttagcctcatcaacctcaatccccttggaggagattttgtgacccaaaactataccatcacgtaccatgaaatgacacttttcccaattaagaacgaggttggtttcttgacacctctttaagactttagacaagttaaacaagcaggcatcaaaactagatccaaatgcagagaaatcatccataaacacctctaaaaatttttctaccatgtcagagaagatagaaagcatacacctttggaaagttgcaggcgtattgcagaggcaaaaaggcatccttctgtatgcgaagactccaaagggacaagtaaacgccgtcttcttctggtcctcaggtgctacaggaatctggttgtaactggagtatccatccaagaagcagtagtactcatgtccagccaacctctctagcatttggtcgataaaaggaagcgggaagtggtccttccttgtggcatcattcaaccgctggtaatccacgcacatccgccacctggtaatggttctagtgggaatcaattcattgttatcattatgtattactgtgaccccacctttcttgggcacggtttgcattggactaacccatgcggtgtcagagattggataaatcatgcccgcatccagaagcttcaccacttcttttctgactacctccttcatcatcggatgaagccttctttgtggttgcctaaccggcttcacatcatcctccattagaatcttatgggtgcaaaatgaaggattaatacccttcaaatctgatatagaccatccaatggcggacttatgctccttgagcaccttggtaagcgtggcttcttcatctatagataaacctctattaatgatgacggggtaggttttatcttccccgaaaaacacatatttaagggctgctggcagctccttcaactcccagctttggtgccccatgatcaatgtcagtgtccttcttttccaaaacctctatagctgtctccactacttcttgggatatgacagaatcttgtggttctaattcctcttctattcctttgaccataatttcttcagcttggatacattcatccaatacatcaacacggaaacaatcattccgatcaaaagggttcttcattacatcgaacacattaaaaaccacggactcatcatccattcttaactccagctttcccttctccacatcaattaatgctcgggctgtagctaaggagggtcttcccaagagaagtggtatctcactttctttagccatgtccaaaactatgaagtcagctggaaaagtaaacttgtcaaccttgacaagaacatcttccaagactccactaggtgtaacaccccgtaggcctccgacgtgttatcattaataatatcagattaacgcattaaaacatacataaaatagctcagcggaagcatagaatcgttttcttgatacattatgtatggaatataaaattcatcaatacgcatgcaccagaaatctaaatatatatatatatatatatatatatatatatatatatatatatcatgcccctgctgatccagtttatcaaatcaaacataatacagacagataacaagttttataggcagagtaaccaaatacatcatatatactcagggaaagttatatatacatatcatacaagttctgtacagacatatgcatcaaagtccacaccacacatgtcgtggtgctacaaaagaatatcagccctccatgagggtatacagaaccatacatcaaaataaaaccaaaacagagccttcaagctcttcatgccgcttctcactcaagcagcctagtctcaattgggcctcctgccctgagacagatcttctcgaccagacgtgtcacctgaaatcatgcaaggcccacatggggtgagataacatatctcagtaagctcagggtccctgggaaatcattcccaccctggcccacagattcacagcacataaacaggcatatgcatcatacacggcccactggcctcatcatatcaaatcaatatcataatctcaatcacatgacaggtggcagagctcctcaatgcctggcggagctcctcaacgccactgacggagctcctcaacgtcagacctgtcatggtgtggcagagctcctcaatgccacagggcggagctcctcaacgcccaggatacacggcggagctcctcaacgccggtatttatctattggccaacagatatctcaagcacaggacaatataagcacagcacaatatcaaatgcagatgcataaactcaatacaacaatgtcacagccaatgcatgcatcatgaatcatgaccaccactccccaggagtgtggtgtgcaaccaaagcgggaattcatccccaagaaacactaaacttacctggtaaggtctcagactgcagttcctttccaggtctgtggctcccgccaccaacaatatcaagctcacggcctgatcaaagcatacataattccagatcaatactcagccatcaagctcaagcacagcacataatataacataattcccctatcctagggttcaaacaagttcagcctacactaggctgatctcagacctctccaggtccctctggccacatacgagccatctgagtcacccaaactcagaatatagccatctggccgagttttcctcagccttaactcacttatcattagaatggactgagtttcacttaaagtctcattcagctagcccctcaggcttacataacctcactaaggctctggcatgtcaacagacaatcataagtagccattacacaggccacataggtaacacagagccaaaaaccaaaatcttcagaatcaaaaactgaaagctataccttcatctattcatcgtcctaattaagtttctcaactgaaccctgggctaattctagccccatctcagtatgggtcacaaaacttagggaatcccaaattcacagagactcaagagaacttgaattccttacctcagtggcgacccaggagatctcaggacagcttcctcgagcgctgatgcccgtctcctgccttggtcttgcctattctcgggttctctgagggtttctcttgagaatcctaactctcactcacaaggggttccggaagaaagagatgaaggattaagctttcctaaggtttctcttaagtttcataaccaaaaacaagcatttaggttcatcaatcatggttcccagaagcttggaaggtctctaatggaggttggaagctcaaggaggaagaaaggctgattttcctctcctttttcgcgttttggcctttaaattctggttctgccgacgttcccacgctagtcgcgccatagatggcgctactcgcgccaagctccagtgaaaaacagactttctggagcacttatggcgctactcgcgtggactcccacgctactcgcttgggctggcagaaagaaaatgccatttctaggccacttcccacgctactcgcgccgcacttcacgctacccacttgggaggccaaacagcattggcatatatgcacatctggcgcgggtcgcgccgcaggccagaacagcctatttccactctttctcaagcctttaagcctcctttcaaaggattccaaggcctaattatatatcctccattataagcttaatcctaagcttaacccatgcttaatcatatgtttaaaaaaattcaagatatcacactaggcttccttaaagatctatcaactaattgaagggataccatagtaggctttagctcagatatgcccaaggatttgcatacagtcaagggcattaagttgatgctagcaccaagatcacagagagctcttcccacattgacattcccaatagcaattggaatgttaaagcttccaggatcacgaagcttgggaggcatcttcctctgaatgatggcactgcactcctctgtaagaaccactgtatcacattcttacagcttgtgtgtaatatcttgaatttttaaacatatgtttaagcacgtgttaagcttaggattaagcttataatggaggaaatataattaggccttggaatcccttgaaaggaggcttaaacgcttgagaaagagtggaaataggctgttctggcctgcggcgcgacccgcgtgaagtgcggcgcgacccgcgccagatgtatgaaatgtactaatgctgtctgccatcccgcgcgagtagcgtgagattggcgcgagtagcgccataggattctgccagttggcgcgactagcgccataatggcgcgactagcgccgtaagtgctccagaaagtctgtttttcactggaacatggcgcgggtagcgccatatatggcgcgactagcgtgggaacgtcagcagaaccagtttttaaaggccattcttcgagattttggccaaaacatggtttcttcctccctcagccataaacctccattgatgcttgcccaagcttcttaggacctttgttgtgagcttaaaacaccttcctgaaccctataaccttgattgaaccgattagaaagctgaaatccttcatccttttgtttggaaccccatttgagtgagagtttgagttctccagagagaaacctcagagaacttgagagtggacgggactcaaggcttgggaaaggacaatagagcttggggaagttgtcctgatatcttctgagtcgccactgaggtaaggaattcaagttctctcgggtctctgtgattttggggttttctgagttttgtgacccatgctgagatggggctaaaattagcctagggtccagttgagaaatttgtttaggacgatgaatagatgaaggattagctttcagtttttgattctgatgattatggattttggctctgtgttacctgtgtggcctgtgttatggtcacttgtactggtcatatgatataccagagccttatatatatatatatatgttgtattgagccaggtgtggatattggaatggtgtcttgagtgagacttgaaccattccagagatattctatctagggctgataaggttatgccatgttgatgaggcattgaatctacaatgattctgatattgatactcagcccagatggaccttgtatagtctgagagaagcctagtgataggctagacttgttttgaaccctaggatagggaatgatattataatatgctttgtgctggaatgccttttggattggttttgatatgagattgttatgccttgattaggcattgattctgaggctgttgttggcgggagccacagacctggaaaggaactgcagagtgaaaccttaccaggtaagttcagtgtttctgggggatgaattcccgcttgactgcacaccacacactcccggggagtgttggtcatgattcatgatgcatgcattggctgtggcattacttgcattgattatattgagattgtgtgcatctgtattggatgaatgattataattgagatgagtctgttggccaatagattgaatacagggtattgagggttctctgccttgtatagtcggcattgagggttctctgccaagggcatggagggttctctgccacacagaacggcatagagggttctctgctgaggcattgagggttctctgccagggcatggagggttctctgccatttgtcatgtattgtgtttatgatgatggtgtttatgatatgatgagggccagagggccaggccatggggtcagttatgatgtgtgtgcttgtctgatgcttgtgttgtgaatctgtggccagggtgggaatgatttcccagggaccctgagcttactgagatatgttatctcaccccatgtggggatttatatgatttcaggtgatatatctagacgagaagatcagtctcagggcaggaggcccagctgagacttggctgctgactgaggagcagcagaggagcttgagggctcatttttttttaaagtttatgtttgtacccttgttagggctggggtgtgtgtaccctagattatgtacagttctgtataccctctgtgagggatgatgttgtgtatcaccacggcatgtgtggtgcggactctgatgtatatgtttgtacagaactgttgttgatatatatatacatatatgacttttctcctgagcataactgatgattatgtatttatctgcctatgtatgatatgttgaaaactggatcagcaggggtgtgaatcctggtttgggtgtgtgtattgtatgagacatgattattccatacctaatgtatcaagaaaatgattctaagcttccgctgagattttaaattgatgtttctaaagcgctaatctgatattattaatgataacacgtcggaggcctacggggtgttacattgtgtttatcacattcttgcagcttgtgtttcttggaaagaatttctttcatgaacttggcatagttgggcatattggctaatgcctcagcaaaaggaatgtttacttgcagcttcttgaacatctctaagaatttagcaaactgctgcttttcagccttctgctttgacttcaagggataaggaggtttctcaaatttagagaaattcagaggtggttgcttaggctttgaagaaaccttttctgttgattcaagtgaagtcaagcatcaatgaacaagactcaaaggttcaaggttttggactttaaaacatgctcaaaggaaatgctcaaaggaaagcttgaagaatcaatttgatcaattgtaaaaggaagtatatgatctgataatccaagtgtgcacatcatgcatcaatcattcatttaaatatcattggattaattgattaagtaaaagcaactaattagaaaggcacttaggaagtaaagtttttggaaaaataaaattacataacaaataatcgattacaagaatggtagcatcgattattctgttcttcgtgccctttagaaaacaaagtatgatcattgtaatcgattacatatcggtttaatcgattacatgaaatcggtaatcgattacatgcctgtacatgcatacttagaaaaatcacaactctctgtcttaatcgattacacatcgtgataatcaattacaaagcattacatgcattcttgaacaatcatagctcactgtcttaatcgattacaaagcgttttaatcgattactaagctcatttagaaatacatgcctgactggtttaatcgattacttcacggattaattgattatattgttcataacataaacccagaaactattaggagcattttaatcgattactgtcttgatttaatcgattacaaatgagaaataatcgattacaggagcatgtttaatcgattatattcaattagaaagttgttataaatagaacctacttctctgaagtttgtaacttttgataattcgtattctgggctttcacaaatattctgagctttttgtagtgtgtttctttgagttctaaacacactaagcttcacaaaattcatatgggtttgtgaatcaagaaggtgaagcttcaatcattcaaagcataaggaaaagactgcatatgtgattgtaatctgtctttcaacctgagaatcattcattgtgcattcattcttggattatcaggtgatagctttccttattctttgaaggtgtaaactgttgttttgaatttttatgaagattagtctattgtaaaatggttttcttgcaagtgtgagatagtgtttctctagaagacagctgagtagtgttctcactgtgggttttggtctttaaggatctaatagggtttggatctctgaacttcatctagggttgatgaagagaggcttgtaaatttccttgtaaggatatttttacaatagtggaactctactctagtgttgagtagaagaactggatgtagcctcatagtgtttaaggtgaactagtataaaaatctgtgactaatctttctctttattcattcatctctgaactactttgtttctgaatcaatttcattgcacataaagttttttctattttctattattcttgaaaagggaagttgattgaatattgattcttggttttagaataattttttaaagtgataaagatcctgttgtaaactctgattttaaaattttaatttggtaagattcaaccaattcaccccccctcttggttgttttgaggtattctattcattttcaattggtatcagagctggttcttgtaagatatttaagatcactttttcttttcaaaaagaaacatgaatacttctcaaataacctttaaagagggtgcctctttaaacagacctccaatgtttgaaggggaacacttcaatttttggaaaaatagaatgaatatctttattcaatcaaatgacctagaagcatggaatgctattgagaagggtccctttattccaaagaaaattgtagcaaatgagttgattcccaaagaatgggatgagatgactgaggctgaacaaagagtagtctaatatgattttaaagctaaaaatatgatcacctctgcactttcctctgatgaatttttcaggacagtgagatgcacaagtgcaaaagagatgtgggagatgctggaaattactcatgaaggaactgaggaagttagaagatcaaggaagcatgctttgatccatgagtacgaaatgttcaagatgaattccaatgaaagcatctctcagctgcaaactagatttacacacattgtaaatcatctattgggtctcggaaaggtctttgacactgaagagttaaacatcaaaatattgaagtgcttaacaagaccttggcaaccaaaagttacagcaatcaaggaatccaaggatttgtcaaaaatgtccatggctgcattgtttggtaagcttcttgaatatgaattagaaatgtcttaattaacattttgtgaagatgcaaaaaagaaaacaagaagcatagccttgaaagctgcaactttgaaagctgaaaaagaggaggaatcaagtgaagaagatgatgaggacaatgtgaacttggtggtaaataaagaataataactttgttatttcaattgttatttcaatttattaaattttgaattaatatagaagaaaataaaaaaaaatatcttcaacaaccacaaaaagtatatttatagatttggcatctaattagaaatcgaaaatctcctttatgaattctaagaaaccaatttactgtattccgattttaattgatccttagtttttattcaccaaaggcaacaaaaacagcaacatcaacaacaatctcaacaagaagattgacaacaatttcacatgctttgagtgtggcaaaccgggtcacatcaaatctgagtgctcaatctacttgaggaagcaacaaggtgaaagcaaagtgaaaaaggaaggaaaaggaaagagggcatacatagcttgggaggataatgagtcaacatcttcagattcttccacagaaaatgaagaagccaacatgtgtctcacctccaccatcaatgatggtaatgatgatttgctaagtgatggagatgaggtaaattatgaacttgaccaagctattcatgcttttcaagaaatgtatgaagaagcccaaaaacttgcaaaatccaataataagctcaaaggaaatattagatggcatattgagaaaataactgatttgcaaaatgaaatttgcaacttgaaggaagaaaatgaaaaacttgtttcaagttacaaattaaatggatgtgtgtgtgtttctactctagcaatgttgacaagtatcagttgcttcaaaaagattttgatgagtataaacaaagtcaaggtgaaaaatatatgttgcttttagctaaaaacagtgatttgattgatctcttgagaaagttttataaaggaaaatgcaacttggctgaaatgttaagtgtgcaaaagtatgctggagatacttctggtttggggtataaacatggaacaaaatcatttggaaaaacagtctttgtacctccaaaacagaagaatcaaaagtggcaaaagaactcaagagtcaacaaatattctggttttgggaaaacttcaaaatctgtcacttgcaactattgtatgaagaatgggcacacatcttttaaatgctatgctaggagattctatgtgccaaatggtgactgcatttggattcccaaagtcaaaagaaatgctaacccttatggacccaaccttgagtgggtaccttctattaaaatttgatttgcttttgtaggtgtgtctaagagctaggacataaacttggtatcttgacagtggatgctctagacacatgactggagacatgtcccttctctcaaatctgactttaaaagaaggaggatatgtcacttatggtgataacaacaaagggaagatcattggtgaaggcaatattggagacagcatcaaagctaagatcaaaaatgtgttgtatgtagatggattaaagcataatttgttgagcataagtcagttgtgtgataaaggctttaaagttaatttcaacaaggattgctgcataatctcagatgagaaaagtggtgaggtcaactggaagaaataattaaaataggcaatccctcaaccaaaattgaagaaccaagaactgaaacagaatccacaactcctgtaccaatgcctaaggattggagaacaacaatgttgattcagatgaagctaagcatcattgaagatcaaagtaaagagttttgtgctttcaacatgcaaaaggaagctttaagttgaaaagttcaattgatcatgtaaaagaaaatgtatgatctgataatccaatattgcataacatgcatcattcatacatataggattattaggttaatgggattaatcaaagaaaatcatttagaaaagttaaaaaaggctttaagtttttggaaaaataatatttcacaggaataatcgattaccaggttggtgacatcgattattttgttctaattgccttttgaaatctatacatgatcattataatcgattactcaatgatttaatcgattacaaaggcaaacattgaaaagttgttttgactgccttaatcgattaccaaatattttaatcgattacacatatgttttggtaaaaactgtcatttggttttaatcgattacaggaaatcataatcgattaattggtctaaatagaaaaaatcataacttactggtttaatcgattacgtgtcggattaatcgattaaactattcgttcttggaatcttgaacgagctataagcattttaatcgattaccatcttggattaatcgattacatagtcgaaataatcgattacaggagcttatttaatcgattatttttggtaaaaattatgttataaatagaagtcactgcgacagaaaataagaagaagagaattaacaaatgctgttgagattttcgttgagtgatcattcacaaacaatcagtgctttcattagtgataaaattctgagaaagaaacattgtagaagcttcatagaatcaattactcatgaagatcatgtgttgaagtttttactttcaatcaaagtcaagaaaagctacatatctgtggtgtaataatctgcgttttcatctgtgattcattcatattcattcatcaatggattatcaggtgatatcttttcttgcttagtgattgggttttacaatttatttgtaatagtggaatcttgtaactctattgtaatgggtttctttcaagcatagagatagtgtttctctgggtttttcaactgggtagagttctcaggttgaaaggggtatctctaaggatctaatagtgttttagattggtgaactttgtctagggttgacaaagagagatttgtaattttgcttgtaaagaatattttgcaatagtggaacttctctctagttttgagtgaagaactagatgtagcctcatagtgtttgaggtgtgtaacgaccgctttgattttactttgattcgtatttattttataaaacttctagtttttttttttttttttttttttttcaataaaacaagaatagtaaaaattcaattattttctttgttaattgtggaagtgataaagaatcgtaaaaatatttaaaaatgatttttcaatgttaacgcgttatctaaataacgtaattttaaattactcatacatacttgccatacaacatcattaccagttttgatgcttaaacagttcagacagtccatacagtccaaatagtccatacagtccataatacagaacatagtagaaaacatgcaaacagaaagttatcataacagccgtcaccacatcttcttgtaccacttccatttcactgttcctctgctcgcccaaataatcggggtcatcacaggtgtcaaccacaagacacaaaatagggtaagtcatgataaataaaatttaaatacaatcacaacaccaaatacagagaattagacttatatacgaattaaataaattacaaaatacgtattatctaattaaaatccagaatacgtgtttaataaataaagtacagaatacgtgctaaatagaatttggaatacgtaataaataaaatatagaatgcgtatttaaacaaaatagaatacagaacttgtattataattattcttactatatatatatttttttttctttcacctctttttagaataatttcttttccactttcaatcatacaggaaaatgcatgctcatctttattatatgatgcatgactgagatctcagcaacatctaaataattgtggccactgtcagataaccccaccctcaccttagtggaacgaacttatccatccagtcagggtagctcagtggcgcataggattatcactcccatccatgtgatcatcatggtggtgtggtcctcactgtttctacccccaagttatatggactcagtttagttatctgacgcatacacctctttacgaggatcacttcttcatgagtaacgcctcatcatcatcatcaaattctaccccaccgggtagatgcacatgaaatgcatgaatgattcattttcatcttataaattattcttttattttcatcataatatcacaacgtcattcttacagggcctttatcccagacttatcacaacctcataagtcatcatcataacctcatcttaacaccacagaaaatacagctttataacaaagaattaattgttaccaccaaatatgtattatcccattttcatattcaaattatttcaagcatacgtagttttaatttctcacataattaatgcttctaattagttacttccaaattaagatgtattcttgataattaaaagaaaccaaatcaattgaaataaggaaagaaagtgaagaattactaaaccacatcaccatagcaagaattactcaaatacaattagacaacacaatagttatagaaaattcaagagatattaccaaaccatatatagcatcactaaatctaaataaaccaaaattttagaacatcaaacatcaaattaaaagttgaatttagctaagttttctcctattactcattaatttaatttctcactaatagaagtattggttttatatgtggttaagcatttaaatttcatttatcaaagctttccctatacctcaaatgtttgtcaaattgggaccagctgctctttgctcccaaagcttcacgtatccttgttgcttccttagagaattttggtgaaaatgatagcttagtggaataagtaaatatagtgaagtggtttgtgtgagacttcaattaagctttgaaaacaacttttcaagtggtggggctgcacgattattttcctccttggctgtccccaatttcttccctccttgccttatatagtatgattccatgttggctttaatcctattggttggaatcttgtattattggccaaaaaatctgcagtttacgtggtcttcccagcagatttttttcttcctaaagaatatactttgatagtgtggcttattcctttttgtcttcttcccaaatcttgcacggttagctttagttgaaggagtccaaattcatctttgcttctttgatctgtacggatagtagacttagagatagacccatgtgacttttaagttgtgccattaatgcatattccttttgtccataaaaaatctgcaccatgcttgacttgccatttgattgtttcctttgaattggcccacttaatcttttttttttttttcttgactactacacgtgcctcactcatgaaatcatccattcagatttttctttcctttcctcccttgaccgtagccaacttagtctccaataatgcatgtttcgttttgttttcttttccccaccgtggctatgtttaaatgtcctaggcttggtcctttgtcccaattgatttaaattggtgtctagtttagctttggtatatgatttgttaacccacggaccaccatgctctaccctccatacttttggttccctttaatagcctaattgtattcactcagtgatttaatttataaccttactaatccaccttagtaaattaatttctttaccttataattgcaagaaaacttttaaggttatgtttagcacttttatagaattttctaataactaaaatggttcaaattgaattttattttaaaatgtgtgttaagtgctaaatatctctctatatagtgaattatagtttcctaagcatccttaaatatttccttaaatccatccttaactaaataaaatatcggggtgttacaattctccccctcttaaaaaaaatttcgtcctcgaaatttacctgatgcgaagagtgccggataattcttttgcatctcgctttccacttcccatgtggcatcaccgttggcaccgtttccccaaattaccttaaccagtggaatttctttccctctcaagactttgattcttctatcctcaatccttaccggaaaggtttcataagtcaaattgtcctttataggtatttcatctacctcaatgacatgcgaaggatcatggatatatttacgaagttgagacacgtggaacacattatgaagattggaaagatttgggggtaaagcaatttgataagctacaggtccgactcttttgagaatttgaaaaggtccaataaaacgcggtgtaagttttcgggatttcagagctctccccaccccagtccaaggatttacttttagaaacacatgatctccttcctcaaactctaaatctttccttttctgatcatgataatttttctgcctgctctgagcggttctcatcttttcctgaatcaacttaattttatcagtggtttgttgtataatctcgggtcccaaaattaagttttccccaggttctacccaacacaaaggagttctacacttcctaccatacaacgcctcatatggtgccattccaatcgaggaatgaaaactattattatacgtaaattctattagaggcaaaaagtcttcccagttacctttatgttctaaaacacaagctctcaacaggtcttctaaagactgaattgttctttcagattgtccatcagtctggggatgatatgttgaacttaactttaatttagttcctagtgcttgatgcaaactaccccaaaatctcgaagtaaacctagggtctctatcagatataatactagaaggtactccatgtaatctcacaatttcctttatgtacagacttgtcaaattctctaaagaatacctaaggttaataggaataaaatgagcagattttgttaacctatctacaatcacccaaatagaatcaaatccttttgaactcttaggtaaagatgtaacaaaatccatagctatactgtcccatttccattggggaatctctaaaggttgcagcattccagatggcttctgatgttctattttggctttctgacaaactaaacatgaatacacatactcattgatttctctcttcatcttgggccaccagaacaaaacttttaaatcttgatacattttagtagctccaggatgaatactcaacttacttttatgtccttcttccaaaattaatttcttaaggtcaatatcattgggtatacacactctccctcgtaaccgtaacacctcatcttttcctatctgaaattcgctttttcctcctttttctatattttcaaatatattcctcaaaaaagggtcagatctttgcttatgtcctacttccttcaaaaaatcattagttacttgtaaagctcccaacttaatacttacaggtgtagtttcacacatcaaacttaaatccctaaattgttctaacaatcccatttccttaatcatcaaggtggatatcattaaagattttctgcttaaggcatcagccaccacattggcttttcctggatgatagttaagttcaaaatcataatccttcaaaaattccatccaccttctctgcctcatattcaactctttttgactaaacaaatacttcaaactcttatgatcactaaaaacctcaaaatgtgaaccatacagataatgtctccatactttcaatgcaaatactacagctgccagttccaaatcatgggtgggataatttctttcatgagtttttaattgcctagacgcataggctactactctcccatcctgcattaaaactcctcctaaccccattttagatgcgtcacaatataccacaaaaggtttccctaaatcgggtaacaccagcacaggtgccgtagtcaacttattcttaagagtctggaaactttcctcacattgcgcgttccacacaaaagcttgatctttcctagtcaaagtagtcattggcaaagctatcttagagaaatcttgtataaaccttcgataataccctgccaaacctaagaaacttttaatttctgtgactgtcttaggtctctcccattccatcacagctcgtacctttgaaggatctactgaaattcctccctgagctatttcatgacctaagaaattcaccttttctaaccaaaaatcacactttgacagtttagcatacagttgccgatcctttagagtctgcaaaacaattctcaaatgctcggcatgttcttccttagtcctagaatacactaaaatatcatcaatgaacacaaccacaaatttatcaagatagggatggaaaactctattcatgtaatccataaatacagctggagcattggtcacaccaaaaggcataactaaatactcatagtgaccatatcgggtactaaaagcagttttaggaatatcctcagtttttacccgaatctgatgatatcctgatctaagatcaattttactaaaaacacacgctcctactaattgatccataagatcatcaatccttggtaaaggatatttattcttaattgtcaccttatttaactgcctataatctatacacatcctcatagacccatcctttttcttaactaataacacaggagcaccccatggtgacacactaggtctcacaaattgtttactcaacaactcttctatttgcttcttcacttcagccaactctacaggagacatcctataaggtgctatagatatgggtccagttccagggattaaatctatagaaaactcaacttccctttcaggaggtaaacgatctacttcttgaaacacttcaggaaattctttcactacaggcatactctctttatcaatctcaggttcagattcagagtgagatttaatcatgtatatttgaacatcattcttttccatcatcctaaggactttattaggggagataatctgcatatccctactagctggaggattcccaaaaaatatagttttatcaaaacagttcaacaaaacatggtgagaggataaccagtccattcctattataacatcgatttgttgtagtggcaaacaaatcaaatcaacagaaaacacatgaccctctaactctattggacaatttagacatatttcagaagtaacaactgactcactcgtaggggtagtaaccttcaaaaagaaattcaaaggagacacaggaagagataaagtttgaacacaggtataagaaataaatgaatgagtagctccggaatcaaacaatacgtctaaaggaatttttcttatgaaacacttacctcgaatcaggtcttgagattgagaagtctcacttccattgagagcaaatactcttccagtggttttcggtttttctgggggatgaccttgatttccgttctccttcttcctgagattcaagggattcagaggacaatttatggaaacatgtcctttcttgtggcatatatagcatgtcggttccttatcggggcattgcgaggaatagtgtccaaccttcccgcacctaaagcatcgcggagaagtagatgtagaactttgacctactggaactcgcaccggaggaacatacgaacgatctctgttgtagggtttccccatgttgggatgattctttcctttattcctcataggtcctacattcttataatgagatgctcgggcacgagaatcttcatcataaattctgcacatatttaccagctgaggaaattgtcgtattccctgataatttactgcttgtttaatttctggtcgtaatccgttcaaaaacttaacacacttcgaaccttccccttcaactccttgataatgaggaaaatatctgaccaattcctcaaatttcactgcatactcagccactgttctattcccttgcttcaactcaagaaattccatttccttcttattcctgatatcttcaggaaagtacttttccaaaaaggctgttttgaaaacctcccaagtgattggttgattttctgtttccaatcgcaactgagcattctcccaccaatattcagcttcctctgctaacatgtaggtaccaaaaagtacctttttatcagcaggacaagccattactcggaaaattttctcaatttcccttaaccacaattgagctccatccgggtcatatcctcccttgaaagtgggcggatgatttcgttgaaaaccctccaatccttgatattctacatttccagccctttgctgatttcccactgcttgagctagagcttgcaacgcgtcagctatagcacggtcatttctccccgccatttatacttgtataaatacaacaacaaattaaaaaaattagaaataccgtaatcataaccataacatagatagtattactgcgtcattaccatacattacattacacaaaatactcaaaacatcactaccttcccacagtttttgatttcctaatgggtacctctagacgatccattttcatacatccataccccatttatttagttcctacatatatatatttatatcttatttttagaagttttgatccataacttccactgccacctcattctcttgtcctaccacctcaggagaattatcataatacccctcggtacggatcaccggagcattatcaggtttatcagttccataatacaccacattttctattactcgatgtactagcctatccggagtccaaggtatcacaacggtatcataatattccttggtaatcggaggctcccttatggcagattcagctcggtatatcgctactttcctacagatagtggattgttcatccaccacttcctcttggtagctctgactctccaccaacacaaaaagcatattatgggtgccaaaagtttccatcttcctaaataattccaacaaaaggagaataacaggaaatttaagtattaatcacatatcaaaaatattttcatgtaaatcacccaacatacacgtttattcaacaaaacttttcatacctttatcaacatcaaaaaaatccatcttttgtccttaaaacaaaccaggctctgataccacaattgtaacgaccgctttgattttactttgattcgtatttattttataaaacttctagttttttttttttttttcaataaaacaagaatagtaaaaattcaattattttctttgttaattgtggaagtgataaagaatcgtaaaaatatttaaaaatgatttttcaatgttaacgcgttatctaaataacgtaattttaaattactcatacatacttgccatacaacatcattaccagttttgatgcttaaacagttcagacagtccatacagtccaaatagtccatacagtccataatacagaacatagtagaaaacatgcaaacagaaagttatcataacagccgtcaccacatcttcttgtaccacttccatttcactgttcctctgctcgcccaaataatcggggtcatcacaggtgtcaaccacaagacacaaaatagggtaagtcatgataaataaaatttaaatacaatcacaacaccaaatacagagaattagacttatatacgaattaaataaattacaaaatacgtattatctaattaaaatccagaatacgtgtttaataaataaagtacagaatacgtgctaaatagaatttggaatacgtaataaataaaatatagaatgcgtatttaaacaaaatagaatacagaacttgtattataattattcttactatatatatatttttttttctttcacctctttttagaataatttcttttccactttcaatcatacaggaaaatgcatgctcatctttattatatgatgcatgactgagatctcagcaacatctaaataattgtggccactgtcagataaccccaccctcaccttagtggaacgaacttatccatccagtcagggtagctcagtggcgcataggattatcactcccatccatgtgatcatcatggtggtgtggtcctcactgtttctacccccaagttatatggactcagtttagttatctgacgcatacacctctttacgaggatcacttcttcatgagtaacgcctcatcatcatcatcaaattctaccccaccgggtagatgcacatgaaatgcatgaatgattcattttcatcttataaattattcttttattttcatcataatatcacaacgtcattcttacagggcctttatcccagacttatcacaacctcataagtcatcatcataacctcatcttaacaccacagaaaatacagctttataacaaagaattaattgttaccaccaaatatgtattatcccattttcatattcaaattatttcaagcatacgtagttttaatttctcacataattaatgcttctaattagttacttccaaattaagatgtattcttgataattaaaagaaaccaaatcaattgaaataaggaaagaaagtgaagaattactaaaccacatcaccatagcaagaattactcaaatacaattagacaacacaatagttatagaaaattcaagagatattaccaaaccatatatagcatcactaaatctaaataaaccaaaattttagaacatcaaacatcaaattaaaagttgaatttagctaagttttctcctattactcattaatttaatttctcactaatagaagtattggttttatatgtggttaagcatttaaatttcatttatcaaagctttccctatacctcaaatgtttgtcaaattgggaccagctgctctttgctcccaaagcttcacgtatccttgttgcttccttagagaattttggtgaaaatgatagcttagtggaataagtaaatatagtgaagtggtttgtgtgagacttcaattaagctttgaaaacaacttttcaagtggtggggctgcacgattattttcctccttggctgtccccaatttcttccctccttgccttatatagtatgattccatgttggctttaatcctattggttggaatcttgtattattggccaaaaaatctgcagtttacgtggtcttcccagcagatttttttcttcctaaagaatatactttgatagtgtggcttattcctttttgtcttcttcccaaatcttgcacggttagctttagttgaaggagtccaaattcatctttgcttctttgatctgtacggatagtagacttagagatagacccatgtgacttttaagttgtgccattaatgcatattccttttgtccataaaaaatctgcaccatgcttgacttgccatttgattgtttcctttgaattggcccacttaatcttttttttttttttcttgactactacacgtgcctcactcatgaaatcatccattcagatttttctttcctttcctcccttgaccgtagccaacttagtctccaataatgcatgtttcgttttgttttcttttccccaccgtggctatgtttaaatgtcctaggcttggtcctttgtcccaattgatttaaattggtgtctagtttagctttggtatatgatttgttaacccacggaccaccatgctctaccctccatacttttggttccctttaatagcctaattgtattcactcagtgatttaatttataaccttactaatccaccttagtaaattaatttctttaccttataattgcaagaaaacttttaaggttatgtttagcacttttatagaattttctaataactaaaatggttcaaattgaattttattttaaaatgtgtgttaagtgctaaatatctctctatatagtgaattatagtttcctaagcatccttaaatatttccttaaatccatccttaactaaataaaatatcggggtgttacaaggtgaaccagtataaaatctgtgtgttctttaattttctcagttttacatgcttattacattgtttgtgaatcatattcaaagcacagtttgagatactctgttttctgcattcttgaaaaggggagttgattgaaaattgatttctggtatcaaaagaatttctaataagtgataaagatcctgtggctactctgatttaaattttaattgggcaaagtttttcaaccaattcacccccctcttggttgttttaagtattcatttgtttttcaaacaaaagacctatcacttgacaacataataggtgaagtttcaaagggagtatcaactagatcctcattaaaaaacctatgttgtgatatggcatttgtttcacaaattgagcctaagaatattgatcaagccttgaatgatgaacattgattgcatgccatgcatgaagagctaaatcagtttaagaggaatgaagtttgggaacttgttcctagaccttcatctcttaaactcattggcacaaaatgggttttcagaaataaacttgatgaaagtggaatcatagttaggaacaaagctagattggtagctaaaggctataactaagaggaaggcattgactatgaggaaacttttgctccagttgtaagattggaagcaatcaggttattacttgcatatgcatgcctcatggatttcaaactttttcaaatggatgttaaaagtgcatttttaaatggatacattgaggaggacatatatgttgaacaacctcctggttttaaagattttaaacatccaaattatgtttacaaactgaaaaaggcactttatggtttgaaacaagcccctaggcaatggtatgaaaggttaagcaagttcttgcttgaacaatcttttattagggggagtgttgataaaactttgtttatcaaaaggcttggtgatgatttcttattggttcagatttatgtggatgatattatatttggttcaactaaccacatgttatgcaaagatttttcatcagctatgcagaaagaatttgaaatgtcaatgatgggagaacttacattcttccttggacttcaagtaaagcaaataaagaatggaacctttcttaaccaatccaaatactgcttggaaatcattaagaaatttgagatggagaagagcaaggaagctgcaactcccatggctacatcaacatatcttgattcagatgaaaatggaatgaaagttgatgagtcaaaatacaaaggaatgataggatcattgttgtatttgacagctaacaaacctgatataatgctcagtgtttgtttgtgtgctagatatcaggctaatcctaaagaatcacaccttactgctgtcaagagaatactgaaatatctcaaagctactccaaaagttggtctttggtatcctaaatgtgcttctttaaataatattggttattctgattctgattttgcaggttgcaaattagataggaaaagcacaagtggcacttgtcatttgcttggaagttcattaatctcatggcattgcaagaagcaatcatgtgtggcattatccactgctgaggttgaatacatttcagctggaagttgttgtgcacaaagcttgtggctcaaactgcaaatgcttgattatggagtggaattgaatgctatacctctgctatgtgacaatacaagtgcaatcaacatatcaaagaatccaattatgcactcaagaacaaagcatattgagataagacatcatttcctcaaggatcaagttcaaaaaggtaacataaaggtagaattcattgacaccaatcatcaactagttgatatattcacaaaaccactatctagagaaagattttacacacttagaaacatgttagggattcttgatgaaaacaacattatctagcttgatcatatgtgtttccatgtgatgattgaaagcctatatatcactgaatgcttttgtatgggtatctttgtcaaaaagctgctaaaatgctctgtatctgatattttgtctgtagtaatcgattacaccacgggttaatcaattaaaatcattaaaacctaagtatggaacgaaattgacatacatgtaatcgattacactataatggtaatcgattattcttcacattttcagaaactacttctctctggaataatcgattacgtatcgggataatcgattacaatgttctaaattcaaaaacgtaaagcacatctctctggaataatcgattacttatgagcagtaatcgattaccattcatgttaaaatgatgctcactctgtgataatcgattaccactcgggataatcgattaccaatggccctgatacttggataactgattcaagctataaaataatcgattacttaagcaaagaatcgattacaggtcatcttcaacctttgatcaaggatgaaaataatcgattacttatgtaaataatcgattaccacgtgactgaaaagaatcctaattgaactggaataatcgattacacaacgaaataatcaattattcatactgttgtctgaaatttgacttgattttgtgacttaattaactgcccaatcaattacagaactactcctaatgccattaaaccatcccaacagctatatttttcaaaattatggacgttaaacagtctaattgtgcctataaatagtgattgcaagccaaaggaaattctgcaccaattctcattcttctactctgcaatttttcctgaattttatctctgtgtctacgttctgtctaagcctattcttaaataatgtctgagcctgcttccaaaagaattaggaaaccaaagaggagacttagtgaatcctcttctcaacccaaacctaaacctgaacctcaaccacaacccattgataggcttgatatctggttctcttctgagatagataagataaactaccttcagtttaatgccactaagcctgtggccacacccaaatatatagagcttgactggttaattaggcaaggattccaatttcctgcctatttagagtcacaaggcttgaggaggtttctagagatgaagggtaccttctaccctgatcttgttcgtgtcttctacacctgcttaaagggttcaatgcagggagatatgaagtccaaggtgaaaggggttacgatgcacatcacccctgtaatttaggagacagtgggaggaattctatgtgagggggctcgcagatttgatgaagaccctgatggttacagcaaaatggacacatataggagcatgcttcatgacccaaacatgaggcttaggaccagacttggcacaggtcctatgactgcagaagataggatgctgcactatcttatcacatacatcatcactctaaggacaaccaaccatgctcaagccactgatgaagatcttcagttggtgtatgggctaaagcaccatatccccatgaattgggccttgatctttgaggagatcatgctgaaatccaaaaggttggttaattaccctttcccctatcctgtttttgtttcaaggctcatagatcatttcaacatagatgttgaaaatgaagttgtagacaacactctctcctacaacagtcaaattaaggagaaacatctaaccaagatgggcatgaggaagacacccaatagctgggtaatggctgcccaaattggtgttgctgagcaaggggagattgctgcagattctgaggaagaaggacaacaaggacaaccacaacaaccccagcaagctttctcagattttgaatcacttacgattcaaaagatggactccatgctgaaacttcaagaggacttcaaggctgaaactcatggagccttagaagatattagagagagattggatgctattgaggcaaacatgaatgatcaagcatctgcaaaattctaggattgattaaatttagattttgtctgatctgcctctatatgtaatggaattagttatgatgattagatttagattttgtctgatctgccttctatatgaaatggaattagttatgatgattagatttagattttgtctgatttgtcttctatctgtaatggacttagttatgatatattttgataagatttagtgtctgatctgataagtaatggactatgttctgttctgtcttccttgtgttttgtttttaaaatttcatattgtattgtcctctatgcttcaatattaatgaaattatgcatttccagtatttaatctgttgtgcctacactatttttgacttttaacaagccaaataggaggagaattgattaagggggagcagtttaaaatgtgctctgttcatccctatttcctgtttttttattcaatttttgcccagaaattgatttgtatgaatgctgatatttagggggagtttatgtgtaaaaatgaacctaatacaatggtatgatacttaaatgaatgtctcataagcagacatgtgctttaacacttgtttttggcaagattgtttgaaaattttcaggtttataaagcttgttcatacaaaggcttttcaaattgatctccaagtaattctgcttaatcaaatggaagatttggcatgtttaaagccaaaaagggggagattgttgattcaagtgaagtcaagcatcaatgaacaagactcaaaggttcaaggttttggactttaaaacatgctcaaaggaaatgctcaaaggaaagcttgaagaatcaatttgatcaattgtaaaaagaagtatatgatctgataatccaagtgtgcacatcatgcatcaatcattcatttaaatatcattggattaattgattaagtaaaagcaattaattagaaaggcacttaggaagtaaagtttttggaaaaataaagttacataataaataaccgattacaagaatggtagcatcgattattttgttcttcgtgccctttagaaaacaaagtatggtcattgtaatcgattacatattggtttaatcgattacatgaaattggtaatcgattacatgcctgtacatgcatacttagaaaaatcacaactctctgtcttaatcgattacacatcgtgataatcgattacaaagcattacatgcattcttgaaaaatcatagctcaatgtcttaatcgattactaagctcatttagaaatacatgcctaactggtttaatcgattacttcacggattaatcgattatattgttcataacataaacccagaaactattaagagcattttaatcgattattgtcttgatttaatcgattacaaatgagaaataatcgattacaggagcgtgtttaatcgattattttcagttagaaagctgttataaatagaacctacttctctgaagtttgtaacttttgataattcgtattctgggatttcacaaatattctgagctttttgtagtgtgtttctttgagttctaaacacactaagcttcacaaaattcatatgggtttgtgaatcaagaaggtgaagcttcaatcattcaaagcataaggaaaggactgcatatgtgattgtaatctgtctttcaacctgagaatcattcattgtgcattcattcttggattatcaagtgatagcttttcttattctttgaaggtgtaaactgttgttttgaatttttatgaagattagtctattgtaaaatggttttcttgcaagtgtgagatagtgtttctctagaagacagctgagtagtgttctcagtgtgggttttggtctctaaggatctaataaggttttggatctctgaacttcatctagggttgatgaagagaggcttgtaaatttgcttgtaaggatatttttacaatagtggaactctactctagtgttgagtagaagaactggatgtagcctcatagtgtttgaggtgaaccagtataaaaatctgtgactaatctttctccttattcattcatctctgaattactttgtttgtgaatcaatttcattgcacagaaagttttttctgttttctattattcttgaaaagggaagttgattgaatattgattcttggttttagaataattttttaaagtgataaagattctgttgtaaactctgattttaaaattttaattgggtaagattcaaccaattcacccccctcttggttgttttgaggtattctattcattttcattttcttcctccttcccgggttcccttgagctgctggaggcttcttctactttaggttcctcctcaatgataggctcttctttttcctcctctctggagaccactttaggtttttctttaagagcaatcactatcccacttctggtggttatggctttagcatgttccctaggatttaccacagtatcactagggaattggccaggtgatctctcagctagttgcttggaaagctggccaatctgagtctccagattcctgatggatgcaccttgattcttcagctgagacctagtctcattcataaaggcatcagtgttctggatgtggtcattggtggtcttggccagctgcaacatagccttttctaattctgatggctccttgggagggatgggaggtggttgcaaataatggttagacttatagtccaacccacctccttgtggtcttcttggataactaccattcccagaagcttggttgtaattcctctgataaccttgtggtggcctctgatcataccatactccattcacctgaattggatcagcccccaccaaggttggacaaacgttggactcatggtccccttggcaatattcacatacaaccatgcctgccttagttgaagaagcttggacttttgagatttcaagcttgtcaatcttggcattgaggatggctagctgctgtgatagaagtttttgctcagccaacatagcatctgtgctacccaaatgaatgacttccctcttaggagttcctcctctttcttaagcatggcaatttaaaattaatttagaagtttcttatttatctttttttgttttttttttacatccatgcgagggtagcatcataggcggatcttttatcattgtcagtctatatatggttacttgggtatcttctagagaaatacaggcaactgttggagttactcctcatagctcttgggtctctgaaccacttattcatgaaagaagtgcacatcaaagaggtcttgtttttttggtgtctgctagcgtatccccaaagtcatcatcagattaagggaataagttattagatgctatgcaattgtaaaaattggtctcatgattctcaaatctatttcttcaataattttaataggtaaatctgtatttgtgtttgatcatgtcaatttatttcgggacaaactttgaatagaggcaaaaaggaatagactcaaagaacacgacagaggcaaataaattttgaaaaatgcataaaacacattcaaactaaaaaaatagaaagaaaattataaaaaaaaaaattgcagcaaaaggatatagtcacatgttgtacacgtgccaattgatgccattagtgaaagattggtgagtaattctattaggtgtagtaacagaattaggaaaatgccattatggttgaggaagtgagtgaagagtatatgttactaaaaatgagagggtaaaaggtgtggatgccattagtggaatattccttcgttttctgttttcttccctgatgctcttcagccattgtattttgcttattttctgtactattctgacaataacagaaggttactgctatttgtagaattatatcatactctattgtgcaatttctaattgtgtagggataacataatattataatattatgctctataccagatactaggcaatccctaactgagtttaagcaaccttaaattcgcaaagtaacaaatcctctactgacatataattgaattctttaacttatattggcgttaattatttttctttaaaatttagataatcaacatttgaactctttaacttagtaatttttatgggccatgctttgaatttttttatattctaattgtcaattttaaaaaaaaatggtgcttactttaatatatctttcaattattaagttttaaagtaagataactcatgtatatgcattcattaatggtaattagttactacttagataaccacatgtctttattaccattttgtaacacttgatattttaagtttccatttatatcaaaatttaattaatattaaaattattgacattataaattatcattaaaagtaatgagatagtcaaataatataaaatgtcattcaatgtaattaattaaaaaaatgtcattagtttatcattaaaatactaatattaaatcagaaagtcctaacttcttttttaaattttacatttttatcatgaactaaaatacttatcaatcaaacaaatttcactatacccacattactgtttctaaagggtgtgcaagcaagttcaagtttagtcgatgataacataactctgtccgttcaagccagcttcatcgtgccgtccattcaagcttcatcgtaaccttcgtgaaaaatggtacatagtgtgaaatatggtacatagtgttaatagcagacatcgtggtgtttcaatgtctagaatttagggttcaagaggattatgatagaagaaaacgtacatagtgtgaatcgcaggttgtcgtagacgtgaaaaatggtactcatcactgcaccagtgccaacgataccaactcaccatctattcttcaacgaaaatgttgatttaaggaacaaaaacccacgtactttgccttctcccaaccatcaactcgagcttcgatcatccttgtgccaccccatacagaacttcccaaaccacacttccccacaaccccttattcctcaaacaactactttcacgaagaagaagaaaaaaaaaagagaaaatgggccacaacctctgacatattgcacttgatggaagctctaccctttcccgtacccattgacatctacacctctctcataaaagagtgcactgttttcggtgacccagaaaccgccattgagttggctatacacatctccaatagcggcatcaaacccccactgcccatcctcaatcggatcctcatcatgttagtgtcgtgtggtttgttggaaaatgcatcccacatgtttgacaaaatgcgtgtgagggacttcaacacttgggcaaccctgtttgttgcgtactatgataatgttgattacgaggaggctacaactgtttttgtcgacatgttaggccaattgggcatgttggaatttcctccatggatatgggcgtgccttctcagggcttgtgtatgcactgtgaatgtcccttaggaatgcaaattcatggatggttgttgaagttgggtacttgtgatcatgtgcttctcaacagctccttgatcaacttttacgggagattcacgtgcctggaagttccgagtgttgtcttttatggggtgtcacgacataacacgttgacttggacagctaaaatcgttagcaattgcagggataggcatttctctgaggtttttggtggcttcaaggaaatgggaatgctaggggtgaagaaggactgctttactttttctagtgttctcaaggcatgtgggatgatgctgaatcaggaacgatgtggtgaagttcatgctgatgctatcaaacgtgggctggtctcggatcactatgtgcagtgtagtttgattgccatgtatggaagatgtgagttgttgagagatgcaaaacggatgcttgagatgagccgggacgagataaaatttcagacagagaaaatttttcttacatggaaacttgaatcctgcacctcccatttttttttaaaaactcaacctaccccttctatcatcttccttccctttcttcttcttcttctttctcccacaatagcaatagcagacacacaaccccttctatttgttctcatcttcttcctatagcgaaatttgaacctcgctttccaattcttctcttctactccaactcaagtctttttctcgcaacaatcaatggttctagcatagaagtgcctctcctcgtccaactctccacgccataagtacgttttctagaacaggctttctatacaggaaaaaatagtttacaaaatgtctatttcataaggtacaaaatgtacttcccaaaagactattttggattgctgtttttgcttctgaaaaaggttttttagaacgacctttgcagaagataaaaaaaaaaaacttccaaaaatgatactccaaagtgcacttgttgcttctagaatgggatttcagtaaacccaataatatattttggaacccctttccgaaatatcattcctgaaacttgtttttcttatggaaaactcgttctagaaggttttttggttatggaatgtctagtttggaagcttttttttggttatggagtggtccttcttgaagctttttttgcttatggaaagactatctcaaaagtatttttttgttatggaatggtcgttcagtaagctgtttaacagttaattaaatttgattttgttattttacaattttagctttagtttgtatggaggatgattactttaataacaagatgtctgatgaagttgacatggatatgaatgataccgttaaaaatgaatattgtagcaaattttttacaactacggaggtaattttttgatcaagtaccctttacttttggtattcttgaattcatcaaatatggctggctgagaaaagaaatgagaattcatcaagattcataatcatcagaatctgaatctatctcctcagaaaatttatcatttatcattgcactaggagcagatcgatatctaatagattgcaagaagttgaaataggcatacttaatgtcgaactgcatatcataccctgcataaagtataactaccatcaaattttttattaatattggacatggaacttaaaagggaaggcttggtccttacaataatttactgcaatagttaatcctccatcatccacaccctgtctaacatgatggaaccacatagtaggcctacataaaggatactcaacaataagatggtagagtttttgaagtctgggttcattcccacttagaatacacttctttcaagttaacaatttgatacgatcaaaagaagcaaaaaccaaagttctcaaacaaggttgccaaaatattcccattaagttgaaagtacatgctacatcaggtcactcatgcaatgaggatgcttactcgttccttttttctttttcttttttttctttttctttttttaggggttggggatgaagggcagaaacacttaacacagaaaataccaccaaattcatgcattcactcgtgttgcatggcaaaaattgctagatagcaagcctcaataaatgttgtatggttgagtagaagtttttttttccttttctgatgaatgaccagaagtaattatatcaggacatggaaatacgtttgatgcatcaaatgcaaaattttaatgttagtactactgtggccatgaaccattagcctatcagctataattcactcattccattaaattgaagcaaataattaggcaactgattttattataaaaaatgatatgcaaatcacggaatgcaggaactgtgtcagaaaagaaaccagaaaatatattattgaagcattcactaaaggagattagtatgcatgccaaagatctttaagagagattattcaattaaactagtaaaatggatcacagtcactacattcataaagttcagtaggcattagagaaaacggattaaccgaaaagcataacgcatgagcaactaggaatataacatagttatgtaattttaattaacatcatatgcccggtgacctaatcacaggttcaaatttactatctcagatgataaagaatacccaatagaagaaataaagcatagcattaaaacacatgcatatgatgcatatgcaaaacaagggaatcttacaaatagagaacctagccagccttcacagtacattcaaacggcctagggccattgaaatgcaggggaaacttggttatctcatcatccatggtctccagagaaggataaggatccacactgcaccaaggcacataccttgttggcttctcaagttccaatcgaattctcttgtatcctacaaaccacaacatccaaatgaaatcaactctaaaaggcaacacttttaatagcaaaacccacaccccatcaacaagaaagaagaagaaaaaaagaaagaaagaaagaaatacacaatttggttcaaagtaaatattaattatacttgatatagtcctttaaaatttcagtttaaacaaaccagtctcttaatgattgatttaatcaaaagcagacaactttgctaagatgaaactgctcgagtttcaatctatacaaaattagttccaaaagatggaatttattaacagattgacaacttcagaacttgttagtaatttaacatataaatgacggaaacatatggcatgaaagtaacactgaatttatattttcttgaataaaaagatgatgggatgaaaataccgaagaatatgagtaagtggcagcagggtagtcacgaatatacaagcgatgaacatcagtaggtggcaacaacaggaagtgtttttctccagtgacaacagcgtagagattctcgtagtgatccttatggaacgaggttcgggaatgctggttactgatccagaggttcacagcttcgagttaggagccaatagcttcggtggcccaaccaaagtgagggtcacattcatcagcaagagacgaatactcgaagcgaaaacaatcattttgttgttgtgtgtaagcgactagcttggaagccgcgaaagaggagatgaggtcaagggcgtgggggaagggcacccgcagcacgtgcacggaggcgaagcagagggaggagcagagaggggcgagggcgtcggcgacgccgatgggggtgaggtggacggagacggtggcgccggagagggattgggagaggtgggaagggttggttcaggaagagggtgcgggccagtgcgtaatggagttggagattatgcatggcttgtttggtgtgatgaagtctctcaggaactgaactggggttggtggagactctagtctctctactcttccgccgtttcccaaactcaaatccctcacttccctccacagttcctctatctcattctgctccttcatcttaattaacaactcacttttttcaggaacaggtttctcgagctttttatatgtaacgtggaatcaaatgatcacgtgaaaatcaaattaaaatgatccttgcatgatatggatacatcttagttaattgaacctgatatgatacccaagtattgtaaatcttcttgtctgtctttgaatctttcgaaccacaccacaacacttccatcctaaactatatgggctcgtttttttgaaagattaaaggagacaagtatagagtgaaaaaaatttaatgtaagcctagtcttggtcatgaaaaattgtaaaccttttgtggaggtgatgatctttagtttttacaatttttgtgtgttgtattattacgttttaacaaattggcaaatcaaattttgttatttggcagaatatacagacaatggcatgaaagcatttggatcatttgtgggggcaaagacaatctaaaatggattagacacaacaaatttgtggaagaaaatgtattttgtacgagatttttgtcagctgcatgatatacgagatacaagtttggttgtgaaacaagcaaaagcttgacatttttagatgcacatctaaatttatccgtggagtgcaatctctcaagtagaagctgtgtgtatttcccagttacttgaccatttcaacattcaaggtcagtaggagtccattcattgacaatgacaaagggtggcaaactgggggttttgtcacaccatgtcgccacatggcttaaaattcaactagttcgtggttattttggtgccattcactgagttgtatgcttcgtagcgtgggttgtgctactcaccaatcaatgcccttgatctccaagacatcttgagtccaactagcttccccatgcagctatgtaatgcaagtggtcatgaatgaaagccaccagtctttggccatgtcagctactcactgagtttgaggcaaatcctatttggcaatggccttgcaataagcccatctgtgacccagcctaccaattctccgtcattttttacatggttgaattccctttccacataatccagagatatatgcagcctgccaccaggtttggaatcattgagggttcctcttcctttaattcctgcgttcttttctagtcaataaaggtaattgacctggaacaatgccttgagcataccttgctgtgaacagttttctttgagcgcaacctgaaaaacaggaagatgcattattagatccatataacacaatggcaaatatttcatttaagataacctttcaaattgggcaaaaagtaagcttgatgtaccgatttgctaatgccttaaggggaaaaccatttgacaaataaaccacaacaatttttcagcctctatagctttcgatttttacttttggagaaagaaaagttacaagataaaaatgaattgtttacctttctgcctccaatcaattagctttgaaaaattctccccctctaaagcatatacagatacatctaaacatgaatcaaatgagaaaagcacatcacccccaccacactttacaggaagagaaaaaacaattcaatgaaaaggaaagtcggttgtcaacttacagactattttcccatgtgctctgacaagatgtagccttcatttttataaagctcaaagagggcaaacacatcttccttgttgttgacaatttcactgagcttggatccaagctgcagacaatattcaatttctgcagctgcatcttttgcttcagatgataaagcaaatgattgtgcctattacaaaagtaaacaagccagaatatatacaaattagattgtgcaaaacataataccaaccattctgacacttgttcatccttctaggaagcctaatcaattgatgttagaagggcatatatgatattatacttccaacacatactaggaatttatagtgagttgagaagagcaaataatatgtttaatacttccaagattcaacccacgttgacaagagaaatgaagaaggaatgacagtatcataagaacaatgaccatattaaaaccctaaacaattgcaaaagtaactttccaaacaagttatcatcatagcaagggagagaaggacatgcgaactgatactccccagcctgaactgagaagtgagaagtactattagaaaaagccaataagaatcttaaaattaccaaaccctgatcaaaataaataaatcagtctaattttagcaagcagcaaattttgaataaggaacacaggatctttgttcaaaggtttaattttcacaacttcaacacaagcaagattaactcactttgtttgcaaaagttgcatttaatacgggtacagctggaaatagtggctcctcatcattgacctctttaaccagaggtgactggccacttagtagatattcactaaaaaccaaacctgtcaaaataatcaacgagacatataaaggtttgaccttttaacaaacaaatcaacccctagtagcatttcaagatttccaagtccccgtcccccaacccaacaatagattgcaaaaccaatcctaagactgctatttaattgcaacctacaagaacttccaatattttataacaaacttaaatctacacagaatagacaacatgtcagaatattcaatgtttcatcaacagtataaactataaagtgaactaattttccctaagaaaaatagagcacaactcccacatgattgagtttaagtggatgtgagagagagaacagaaattacttgcaaggtaagggtttaaagtccgtagttgaatggactgatgtgacttcagattgcaatacatgtgggtccaggtcaagacagtaaatgaagcaagaacaaggggtgtggaggagcctatgcagttacccaatcctataccgagccctataccaataaacctgcttgccattccttcgacttcccctttggcaattacctacaatttacaattattttcagagaaaaagcagcataaataagtaaaacaaaggtgtcaaatgcatactcatgaatcatgccacctatagcactagatggattccaaactaagaaaacggaatgattattgtgttgcatcattaacttaatgctcatatttaataaagaagaaaggatctacttttcacctaagcaaaattcctttgagcagcaaaaccagcaaagaaacaactcctggtagaagcctgtgaagaaaaatcagttcaaactttcaatcacagttatcaacctcagatagcaaaacatagcaaccaactctaaaaatgctatagtgagaaagtaggatgcaggatgaccgttattttaaatggtatataacacaaactaaatggtattaacaactgtgttactggggtataaaaatgggcttttgaaggttatatcatggtaacaccactatagcatgtgaaaagccgcaatggccacaattgaaagccactccactatttgaatcccatagtggtctaagactactccaccataacatgctattgactactaaacaagcagatgaaaaaaacactaaagggtaggttagaacaatcactttacacatcttttttttttttatcggcaaaagtatagatatattatatataatattatattcagtacaagtggtactgatgtatatacatcctagcaacaaaagtagcagaactatggtgtcctaatacatgataaacaacatgaattaggaaaccaaaggtctggctgtaccccccccccccccggaatacaaaatccatccctgatgttgctagaccaagaatgaaacgggatgtcaaatcctttaataaagcatcctccatcaatttatgaccattgaaactttcatttaggaagacaatcgtattcctatgatgtcaaatgcaccatgtcagagcgatccaccaagtctgccactgttgtaacctaagcccattaagataacagtactttacacatatcattatgatacttaaatatacttaatttcaatatgcttagtattcatttaacttttgtactcaccctcacaccagaaaaaccaaaatcgaatcatcatgtaagctacttaattctaaacaaaaagatttaaacttcaaagacattgcaaatccttcatacactaaaaaacctgcatcacctgaatcaaagaagtagcagagcgagaggccccagcaacagcaccaacgagcacaaaaaactgaggacaagcaggagtacacatctccaagccaaaggcagcattctcaagaagatcagcaacaatctccaccctttagggttaacatcaaaatggcgaccaaagttagacaacatgatcttactaaggtacctaattccatccttgagcacccaattgatcgcaacagcagtgggaatagccccttttcccaatccaacggcttcatcagatgaacttcagccaatgaggaattcaggtcttcttgagaatgtgatctcctactctgcagacgcatctgacttctatgtggggaccagaaagcacccatgttgccaatgtcaaactgcatctgccctaaactgtttgaggaataactatgagagacattattagctaatcggtacaatgaagactccataagctcgatgccatcactgttgtcgccaagactatgccctagaccaaattggctttgttgtgaacttgcaatttttgggctcagaggcatctttagtcttccatcccctgcagtatcataggtgtaaattggatttcaaagtcagttctaaaataattactcatgtgaattatatacagaattcacaagctattttgagtcacaacttggtcatgatttacaaaatatgcacaaatcatccacataataatgaaaaattgagaacatacacatttgtgacaactacaagctttgagaattgatgagaacatgataaaaacaagtcacagtgatatccaagatatacaaatggatgttggtcactataccacatttaatagtaaaaactataaggacaacaaaaacagaccaatttctaagcgtctcagaaaaactttaaacaagatagttcatctaataagtttttggattagtactaatcatatgtataaataaatagcttaacagagttcattggactccatcgctggaaccgaaaaggagatggtatgttaagaacagaagcaccagtaacactgttatgcctggaaatgggaagatattgcctccggaaaaaccttggcatccaattgccaatacatgataaagctcaaagaagtagaataaaagaaagcaacaaaatgggcacaagaacaagaggatttatcttcatctagaaaaatgccaagtcatgaagcccaaatctagtggaaaacgcctttccagcttccaacaaggcaacaccaagtgtccaagtgatattttcagagccaacagttatctggttatcattaatgtgcaaaccctccctcaacagacaggcaatgtagggtgccctgaagcagtactgctcaataaagggcttcggagcaacacttctctttgcaacatcccacctcttctcacaaaaactcttaccctttgccaaaacatcatcaagcgtggcctcagaaggcaagttgaaaaacctatacacaacgtaaaatccagaaatcacataaaagtgtccatacgggtgaggcagattatcacccaaagcgcaaggctgtgctccaccatcaagcccggcaccaagatcagtccattcagacaaattcacagcaactttcgcgagcgcattgcactccccccaattgggagcaccaatggagttcctcccaaccctccattcccacctttcttactagacgaacaacgagaacacaagtattcctccctatacccatcctgcaaacaaggatgtttcaactcaacattcccaccactacccacattcacattacccaatcctaactccttcctaaatagatacaccacagacttcccaaacgttggaaacaaaaagaatgagctaaatttcaaaacatttgaactctcaagcatttttttacaaaagaaaagggtggtatctattcaacattttttacagtgtcaatgtacaacatacttctaatatagttaattcatgattgagtacgtaatacttccacaagcaattcttaattttttaagcaaagattcccagggctgcattccagctgtttgcatctgatacagaaacttaacagcttcaatgtacaaattattctgcatgtaacccataagcatagcattccaacaatcaacctttctctcgtcccggctcatctcaaacacctgttttgcatctctcaacaacccacatcttccatacatggcaatcaaactacactgcacatagtgatccgagaccagcccacgtttgatagcatcaacatcaacttgttcaccacatcgttcctgattcagcatcatcgcacatgccttgagaacactagaaaaagtaaagcagtcctttttcacccctcacattcccatttccttgaagtcgtcaaaaacctcagagaaatgcctatccctgcaactgctaacgattttagctgtccaagtcaacatgttatgtcacgacaccccatagaagacaacactcgcatcttccaagcacgtgaatctcccgtaaaagttgatcaaggagctgctgagaagcacatgatcacaagttcccaacttcaacaaccatccatgaatttgcattcctaaagggacattcacaatgcatgcacaagccttgagaaggcacacccatatccatggaggaaattccaacatgcccaattggcctagcatgtcgacaaaaatagccgtagcctcctcgtaatctgcattatcatagtacgcaacaaacagggttgcccaagtgttgaagtccctcacacgcatttttccaatcatgtggcacgcattttccaacaaaccacacgacactaacatgatgaggatacgattaacaatgggcagtgagggtttgatgctgctattggagatgtgtatagccaactcaatggcggtttctgggtcgccggaaacagtgcactcttttatgagagaggtgtagatgccaatggatacgtgaaagggtagagcttccatcaagtgcaatatgtcagagattgtggccccttttctcttcttttttttcttcttcttcgtgaaagtagttggttgaggaataagaggttttggggaagtgtggtttgggaagttctgtatggggtggcgcaagggtgatcaaagctcgagttgatggttgggagaaggcaaagtacgtggatttttgttccttaaatcaacattttcgttgaagaataggtggtgagttggtacagttggcaccggtgcagtgatgagtaccatttttcacatctacgacaacctgcgattcacactatgtacgttttcttctatcattatcctcttgaaccctaaattctaagcattgaaacaccatgaagtctgctattcacactatgtaccatttttcacgaaggtcacgatgaagcttgaatggacggcacgatgaagctggcttgaacggacggagatcgcgaggtcgaggcttgaagacgaggtccagtcgcgaggtgtgtgactcagtgattgtgtgggctgcgctgcggatgaaactaaggaagaagaaaacctaaaaaatgcacaaagtgaaaccaggccattttgctttaaaaaaaaaaaggccaaattttaatggctacccctggatccgcccctggaggtggcggtaggaggagagatcctggagagagaggtggtgggggagggaatgtgaattgggggagacgagtgatgcgattctggcaaagaccatggccttttgcaatttggggaatgctgagatgaattggagaaagtggggttaggtggggggaggagaaagcatggcatttcggagagtgagattttagggggaagggtttgggttgatcgccattgatgagaggagagagaaatggatctgagtctcgtaatctcctggcgttggttgggtggaatttggcgatgactttgatgaccaaaacttcaaagattagaaattaaaaaaacagacgaatgtagcatccacgggatgctggtggcactggccgataggtccaaggagttatgttatcaccgactaaacttgaacttgaacttgcttggacaccctttagaaacagtaatgtgggtatagtgaaatctgtttgattgataagtattttagttcatgataaaaatgtaaaattaaaaaaagaagttatgactttctgatttaatattagtatttgaatgataaactaatgacatttttttcattaattacattgaatgatatttcacattatttgactatctcattatttttaatgataatttataatgtcgataattttaatattaattaaattttgatataaatggaaacttaaaaaatcaagtgttacaaaatggtaataaagacatgtgattactaagtagtaagtaattaataaccattaatgaatgtatatacatgagttatcttactttaaaacttaacaattgaaagctatattaaagtaagcaccatttttttaaaaattgacaattagaatataaaaaaattcaaagcatagcccataaaatttactaagttaaagagttcaaatgttgattatttaaattttaaagaaaaataattaacgccaatataagttgaagaattcaattatctgttgaaaaacaaaggaacgggggtgaattggttgaaaacttgtccaattaaaattttacatcagagttataaaccacaggatctttatcacattaaaacaattttcaaagacaaaacaaatctcaatatcaaaatcagttttcaatcaatcttccctttttatgagcaacagaaaacagagtattacaaatcttgagcaatgatattgattcacaaacaaagtaatacgaaattgaaccggaagaataaagagaacacagattttatactggttcacctcaaccactatgaggctacatccagttctccaactcaacactagagaggagttccactattacaataaaatctttacaagcaatattacaagtctctttccttcaaccctagaagaaattcaaaaatctaaaaccctattagattcttagagacaaccccttcaccctgagaaccctacccaggtgaatcctagagaaactctatctctttgcttgcaagaaactaattacaacagaaattcttttaccaatttacaaagaaattgtttacacaatcaaaagccaagaaaagatatcacctgataatccattgactaacgaatatgaatgattaacagatgagtatgcagattatcaccaaagatatgcagcttttcttgtaacttgattgcaagaagaaaacttcagctcatgatcaatatacccacatgaatctaatgaagtttttacgtgtttctctatcacagatgaatattcagaatgtttgtaaatgtttacaacaataatctctcaatcacacacgaattctcggctcttcttttttaatttcagtcgcagacttctatttataactgtcaattaactgaaaataatcgattaattacactctagtaatcgattatttatcatttgtaatcgattaaatcaagacaataatcgattaaaaagcttatgaaacgttcaaagttccaagaacgagttatttaatcgattattccgatacgtaatcgattaagcccgagacacatgtttttccaaattatacaatgtaatcgattaatgaaaaactgtaatcgattaaaatgattatgagcttttctggattttgtcaaagaataatataatcgattattccatgaagtaatcgattaagacagtcagcatacattttcttgagatgtatgttcaagcaagtaatcgattaaactcttatgtaatcgattaagaccgaaagcaccatttttcataaaaatcctgagtaatcgattaaaacgatatgtaatcgattacaatgatcatactttgttttctaaagagcacgaagaacaaaataatcgatgttctacttcttgtaatcgattatttatttgttacttaatttttccaaaaaacttatttttctaagtgccttttaaatcaatttcttttacttaattatttaatccaatgattttaaatgaatgaatgatgcatgactcacacacacacacatggattattagatcatatacttccttttacatatgatcaaattgattctttaagcttccctttgagcatctccatttgtgcatgtttgaatgtccaaaacctttgaggcttgatcttcattcttgatacttgacttcactagaatcaacaatctccccctttttggcttttaaacatgccaaatcttcttcttgattaagcacagatacttggagatcaatttgactaagcttgtttgataaatagtatgaacctgaaaactttcaagcaatctagccaaaaaacaagtgttaaagtccatgctgttcatgaatcattcatttaatcatttgtctattagtgttagattcagtattgtacttaaactccccctaaattttagcttccattcaaatcaatatctgggtaaaaatttgaataaaaacagggataaacagagtattattttactcccccttaatcaattcttctccccctatttggcttgttaaaagtcaaaaataatatgaacacagcggattaatactaaagttgaagtaattcattaatattaaccatatggggcaagttagaacagaaattaaaatactgaatacaaaacaaaataaaaacagagcacatttttggacattacaaagcagactcagatcatacttaatcaatttcgaatcctttacatatagaaagcagatctgacaaatattacatatgaatcttctacattttcagaacggatctggcaaaaatcaaacctagaaagtagatcagacaaaaactaaatctaatctgtacctagggaacatctaattctgttataccctagataactattgaacttaaattcttttatttcatcttcactatcatgattctttagccatgatatcttcttgaagcactagcatgatctcaacctttaaatccttttgaaaggatggcacttcagactccttctgagattttctaatccttttgtaacaaggtttaggcattgtgtcagaataagagatataccaaaggcagagatgacttagtgatgcacattcagaaggctttctatcctctatttataggcagaatcagactctataagtctttccaccgtccaaattttcaaaggttataactgtttggaacaagttcagaggtcatggattcagttacctcattaataggccagttatgaaactcataaagcgcatcaaagtctactcaacagacagagtaatcgattattactttgtgtaatcgattattttagtttacttgggtttcagttacaacatacgataatcgattcttttctttgagtaaccgattaatttgacatgagtcagaggttgaagataactagtaatcgattctttttcttactaatcgactattacaaaacattgattcatctgaataagtagcagagctatatgtaatcgattatcccgtatggtaatcgattattacagagtgagcatctttcaatagcataggtaatcgattacgattattaagtaatcgattattccaaagaaacatatttttgaagatttgaactcttacacatagtaatcgattatcccgatgtgtaatcgattattcccgaaaaaggtgttttcttagattgtgaagaataatcgattaccattggtgtgtaatcgattacttgattacagatttcgttccagacttgaattttaatgattttaatcgattaatacgtagtgcaatcgattattacatagcattcaacaaaaacagagcagtgttgcagcttatatacaatcattcatatacatattcattttaaggacatgttggctttcatatattacacaaaccacaaacagaacaggctagctaagattattctcatcaagtatccctagcatgtttctaagtgtgtaaaatctatctctagaaagtggtttggtgaaaatatcagccagttgatgattagtgtcaatgaaatttacctcaatgttacctttttgaacctgatccctgaggaaatgatgccttatctcaatatgttttgttcttgagtgcatgattggattctttgatatgttgatggcacttgtattatcacatagcagtggtatagcatttaatttcactccatagtcttgcatttgttgcttaagccataagctctgtgcacagcaacttccagctgatatatattcagcctcagcagtggataatgccacacatgattgctttttgcaatgccatgaaatgagagagcttcctagcatatgacaagtaccacttgtgcttttcctatctaatttgcaacctgcaaaatcagaatcagaataaccaacaatatttaagtaacaccttttggataccaaagaccaacatttggtgtaactttgagatatttcagaatcctcttgacagcagttagatgtgactccttaggatttgattgatatcttgcacatagacaaacgctgagcataatgtcaggtctgcttgctgtcaagtacatgagtgatcctatcattcctttgtattttgactcatcaacatcctttccatgttcatctgaatctagatatgttgatgttgccatgggggttgttgcatccttgctcttctccatctcaaatttcttgataattttcgagcaatatttggattgactaataaaggttccattcttcatttgcttcacttgtaatccaaggaagaaggtaagttcacccatcattgacatctcaaattctttctgcatagctgatgaaaaatccttgcacaatttgtgattagtagaaccaaatataatatcatccacataaatttgaaccaataagaaatcgttaccaagccttttgataaacaaggttttatcaatactgcccctagtaaaggattgatcaagtaagaacttgcttaacctttcataccattgcctaggagcttgtttcaaaccataaagtgcctttttcaatttatacacataatctggatgtttaaaatctttaaaaccaggaggttgttcaacatatatatcctcctcaatgtatccatttaaaaatcacttttcacatccatttgaaaaagtttgaaatccatgagacatgcatatgcaagtaataacctgattgcttccaatcttgcaactggagcaaaagtttcttcatagtcaatgtcttcctcttggttatagcctttagctaccaatctggctttgttccttactatgattccactcgcatcaagcttatttctgaaaacccattttgtgccaataggttttagagatgaagatttaggaactagctcccaaacttcattcctcttaaactgattgagctcatcatgcattgcatgcatccaatgttcatcattcaaggcttgatcaatattcttaggttcaatttgtgaaacaaatgccatatcacaacatagatttttttaaagaggatctagttgatactccctttgaaacttcacctattatgttgtcaagtgataagtctcttattgttctccaatctttgggcatttgttcaggggatgtgagtgtttcttctatttcaacacttggttcttcaagttttgttgaggtattgcttgtttcaattgtttccagctgtcctgcatcatcatttaatactttttcctccttagaggtgttagtctcatcacaaatcacatgtactgactcttcacagaacttttcaaaaaactcattttggaattcaccaccatggtcacttcttattgaaactattttacttcctttctcattttgagtaagtttggccatttttcgaaaagcaaggaaagcttcacttttggatttcaaaaacatagtccaggtatatctagagtaatcatccacaatcacaagtccataataatttccacctaaactcatggttctagaaggaccaaataaatcaatgtgaagtagctcaagtggtctagaagtggaaacaatgtttttactttgaaaagaacttttagtttgtttccccttttgacaagcatcacaaagtttgtccttctcaaacttgagtttgggtaaaccaacaactagatcttttctaatgagcttgttcatgtgatgcatgttcatgtgacttgctcttctatgccacagccaagtttcatccactttgctgataagacatgaagatttatgaaataatgcatgatcaattgaaagcacataaatgttacctcttcttctacctatgtgcagtacctcgccattcttgtcatctgttataatgcagttgtctttgttgaaattcactttatagcctttatcacaaagctgactaatgctcaacaaattatgcttcagcccatctacatatagcacactcttgatcttggttttaatgttgtcaccaatatttccttcaccaatgatcttgcctttgttattatcaccataagtgacatatcttccttcttttaatgtcagatttgagagaagggacatgtctcctgtcatgtgtctagatcatccactgtcaagataccatgttgatgttctagctcttagacacacctacaaaagcaaatcagaacttaatggaaggtacccactcaaggttgggtccataagggttagcttttttggttatcttgggaatccaaatgcaatcaccattgggcacaaagaatctcctagcatagcatttaaaagatgtgtgtccattcttcatacaatagttgcaagtgatagatttttgagttttcccaaaaccaaaatatttgttgactcttgagttcttttgccacttttgattcttctgttttggaggtacaaaaactgtttttccaaaagattttaatccatgtttgtaccccaatccagaagtatcaccagcatatttttgcacacttaacatttcagccaagttgcatttacctttataaaactttctcaagagatcaatcaaatagctgtttttagacaaaagcaacatatactcttcaccttgactttgtttataatcatcaaagtccttttgaagcatcttatacttgtcaacattgctagaggaagaagcacacacacagccatttaatttgtaacttgaaacaagtttttcattttcttctttcaagctacaaatttcattttgcaaatcagttattttttcaatatgccatctaagatttcctttgagcttattgttggcttttgcaagtttttgggcttcctcatacatttcttgaaaagcatgaatagcttgctcaagttcagaatttacctcacttccttcactaagcaagtcatcatcatcttcattgatggttgaggtgaggcacatattggcttcttcattttcggtggaagaatctgaagttgttgactcattgtcctcccaagctatgtaagctcttttcccttttccttccttcttgactttgctctcagcttgttgcttcttcaagtagattgcacattcagacttgatgtgacctggtttgccacactcaaaacatgtaaatttgttgtcaatcttcttgttgaagttgttgttattgctgctgtttttgcttcctttgctgaacctttggttcttgtttttccttagaaatttgctgaactttcttacaactaagttcacattctcttcatcatcctcttcactgatttcctcctccttttcatttctagcagttgcagctttcaaggcaatgcttcttgttttcttctcggcatcttcacaagatgttagttgagacatttctaattcacattcaagaagcttaccaaataatgcagccattgacatttttcacaagtctttggactccttgattgctgtaacttttggttgccaaggtctggtcaagcatttcaatattttgatattaagctcctcagtatcaaacacttttccaagacccaaaagatgatttactatatgagtaaatctggtctgcagctgtgaaatgctttcattggagttcatcttgagcatctcgtactcatgaatcaaggcatgcttccttgaccttcgaacctcttctgtcccttcatgagtaatttcaagcatctcccacatctctttagcacttatgcatctcacagtcctgaaaaattcatcagaggaaagtgcagaggtgatcatatttttagccttaaaatcatactgtacatttctctgttcagcttcagtcatttcgtcccattctttgggaatcaactcatttgccacagttttctttggaataaaaggtcctttcacaattgcattccatgctccaggatcatttgattgaataaagattttcattcgatttttccaaaaactgaaatgttccccttcaaacatgggaggtctgtttaaagaggcaccctccttaaaggttatttgtgaagtattcatggttccttttgaaaagaaaaagtgatcttgagtaactttcaagaaccagctcttgatgccaattgaaaaacaaaggaacacttcaaacaaccaagagggggggtgaattggttgaaaacttgtccaattaaaattttacatcagagttataaaccacaggatctttatcacattaaaacaattttcaaagacaaaacaaatctcaatatcaaaatcagttttcaatcaatcttccctttttatgagcaacagaaaacagagtattacaaatcttgagtaatgatattgattcacaaacaaagtaatatgaaattgaactggaagaataaagagaacacacagattttatactggttcacctcaaccactatgaggctacatccagttctccaactcaacactagaaaggagttccactattgcaataaaatctttacaagcaatattacaagtctctttccttcaaccctagaagaaattcagaaatctaaaaccctattagattcttagagacaaccccttcaccctgagaaccctacccaggtgaatcctagagaaactctatctctttgcttgcaagaaactaattacaacagaaattcttttaccaatttacaaagaaattgtttacacaatcaaaagccaagaaaagatatcacctgataatccattgactaacgaatatgaatgattaacagatgagtatgcagattatcaccaaagatatgcagcttttcttgtaacttgattgcaagaagaaaacttcagctcatgatcaatatacccacatgaatctaatgaagtttttacgtgtttctctatcacagatgaatattcagaatgtttgtaaatgtttacaacaataatctctcaatcacacacgaattctcagctcttcttttttaatttcagtcgcagacttctatttataactgtcaattaactgaaaataatcgattaattacactctagtaatcgattatttatcatttgtaatcgattaaatcaagacagtaatcgattaaaaagcttatgaaacgttcaaagttccaagaacgagttatttaatcgattattccgatacgtaatcgattaagcccgagacacatgtttttccaaattatacaatgtaatcgattaatgaaaaactgtaatcgattaaaatgattatgagcttttctggattttgtcaaagaacaatataatcgattattccgtgaagtaatcgattaagacagtcagcatacattttcttgagatgtatgttcaagcaagtaatcgattaaattcttatgtaatcgattaagaccgaaagcaccatttttcataaaaatcctgagtaatcgattaaaacgatatgtaatcgattacaatgatcatactttgttttctaaagagcacgaagaacaaaataatcgatgttctacttcttgtaatcgattatttatttgttacttaatttttccaaaaacttatttttctaagtgccttttaaatcaatttcttttacttaattatttaatccaatgattttaaatgaatgaatgatgcatgactcacacacacacacggattatcagatcatatacttccttttacatatgatcaaattgattctttaagcttccctttgagcatctccatttgtgcatgtttgaatgtccaaaacctttgaggcttgatcttcattcttgatacttgacttcactagagtcaacatttgtcagcagaggatttgttactttgcatatctaaggttgcttagctcagttagggattgtctagtatatggtatagagcatcatattataatattatgttatccctacacaatcagaagctgcacaataaagtatgatataattctacaaatagcattaaccttctgttattgtcaaaatagtatagaaaataagcaaaatacaatggcagaagaacatcagggaagaaaacagaaaatgaaggaatattccactaatggcatccacatcttttaccccctcattttcaataacatatactctccactcacttcctcaaccataatggcattttcctaattctgttattgcacctaatagaattactcaccaatctttcactaatgggatcagctgccacgtgtacaacatgtgactatatccttttgctgcaaatttttttttttatatttttctttctatttttttagtttgaatgtgttttatgcatttatcaaaatctatttgtcttcgccatgttctctgagtctattcctttttacgtatggcatgccactacctttggcagcattaacattaaagtataataaacaagaggtgggctaaagtgtttcttattttattttcattgatcaacttgttattaagttttacgaatgttaaatcaacgaaaattatacgggctatcacaattccaggaagaaaaggaacataaaatatatagacgcacattacaaaattgctctcgaaattcagatacaacacattgtatttcaaaatgcagatataacatgacaacattcaaagtttgtcctgaaatacattgacatgatcaaacacaaatacagatttacctattgaaattattgaagaaatagatttgagaatcatgagaccaatttttacaattgaatagcatctaataacccatttccttaatctgatgatgcctttgggaatacgctagcggacaccgaaaaaacaagacctctctggtgtgcacttctttcatgaataagtggttcagagacccaagagctatgaggagtaactccaagagttgcttgtctttctctagaagatacccaagtaaccatatatagatcgacaatgataaaagatccgcctatgatgctgccctcgcatggatgtaaaaaaaacaaaaaaagataaataagaaacttctaaattaatttcaaactgtcatgcttaagaaagaggaggaacttcattaagctcaactatataacttgttccaaaacaaaaatgggtggattgcagtttttctctctcttttaaaacaaattcttggtgagtacgattgtagtcactttaagttagaatagaaatgcatcaacaactggaaataataataggagttttaccttcctaagtaaattggacttccaaggaaaatttgggagaggatggcagaaaacgcaggttgaagcggattgtaaagggcaaccatggctggccctatgatcttgttgcaccatgtaatgagtccatagttaagggcagatgcaatagttccctgaacaaataaggaaaatatttgtcaaaatctacatgttacaaaactaccaaaacaatctactaaaagataaatctattaaaacagttgtaaggacataggatatttcaatcatttcaagttttaacatttagaaaaacaaaaaactctgctttactccagtagttttccttcccctgttgaccacttaccagcatattacctaaaaacaattttcataggcatattgatgtcctcttgtactttcgtgcatgattgcaagtcattcttaccctctattaacagttgctttactaaacaaagcaaatcgttgaaccataacagcaaaatccatcttattctcaactactgctgcccctaggtaaaaacagttttgtggtttatgactttatgctggaaggctacccgacaattttagttgcttaggtaacaaatgctggcctttctatggttgtcttacagatttgtggatttcttttaacactgtcgtgcatgacagtagttaaaaatcattaccaaaacagaacaattatcagtacatatacatcacaaacatttgtcctcatctaatccctgaatatttgttctttgttttttgattaatacctacatgttagtaacttaacaaaggaataaaatatgaatgaacaatggcacgataaaatagacacataaaatagcataaagtagcactgattattatgtatgaacaatggcacgatatttgggatgcatcacatttgagccaatatcaactgtacaagatgtcaataaaaaaggcttttaatatgaatgatgtaacatcctcaaaattatatcttgaatttatatttatgattgaattaattatggaagtgtgatgataataggatacaagaagaataggataaatttatttgaacataagcttcccaaaacttccatatctgccatccaaattgaaaaatttatttctctctcaattcttattcaaaataagtgcatgatatatggaattaaatatctatatgtctactacaacatattaaaatttcagatcaatctagattgattactgcttgcaatgacaaaaatactaaggtatgtcggtgtcctaagatgaatttgctggaagttttagaagtctagattaaaaatgttatagccagagttttgtaactccaaatcaagcatgtgataccttgttggaaagcttaggaagtctagtttaacatactagaaaatgataatttttggacttgtagattggtatagaataaacaatgactgcacctcatctggttaagtgtatctagccctttggaccatttggattgggcacaatttgtaactcttggaattttggctgaaggaatcaaatattcagctcaaacttggactatttagaagtgtactcacgtgccacatccatggaataagccactgattaaccatccagaaggctctggctgacctctggcacttcttttaatttgtagaacatggtctatttctgtatctcctatcaaatctggaccacgatacaaaaccatcaacatagcaccaaaaacatcgataagagttcctccaacctttgccagaccttcatatctgagcaagtgcactctttctatgctgcatgaataagtttattaaccaatacatcatttcatgtctattatgattgtgcatatgtgcctatctgttctagagaaaaggtgaattaatgataaacaaataaattttatatattaatatacacatacataaaataaaacttacagagttttataggtactatttgtgttgtgctccaattagaattagaggttcacctggataatatgcataaccttttaatgcaacctctatggtcacgatatttgtacgttggaaataaaaagaatgagctaaatttcagaacatttgaactctcaagcatttttttacaaaagaaaagggaggtatctattcaacattttttacaatatcaatgtacaacatacttctaatatagttaattcatgattgagtacgtaatacttccacaagcaattcttaattatttaagcagagattcccgggactgcattccagctgcttgcatctgatacagaaacttaatagcttcaatgtacaaattattctgcatgtaacccataagcatagcattccaacaatcaacctttctctcgtcccggctcatctaaaacaccctatttgcatctctcaacaacccacatcttccatacatggcaatcaaactacactgcacatagggatccgagactagcccacgtttgatagcatcaacatgaacttgttcaccacatcgttcctgattcagcatcatcccacatgccttgagaacactagaaaaaagtaaagcagtccttcttcacccctcacattcccatttccttgaagtcgccaaaaacctcagagaaatgcctatccctgcaattgttaatgattttagctgtccaagtcaacatgttatgtcgcacaccccatagaagacaacactcgcatcttccaggcacgtgaatctcctgtaaaagttgatcaaggagctactgagaagcacatgatcacaagtacccaacttcaacaaccatccatgaatttgcattcctaaagggacattcacagtgcaagcacaagccttgagaaggcacacccatatctatggaggaaattccaacatgcccaattggcctaacatgtcgacaaaaacaatcgtagcctcctcataatcagcattatcatagtatgcaacaagcagggttgcccaaatgttgaagtccctcactcgcattttgtcaaaacatgtggcatgcatttaccaacgatccacatgacactaacatgatgaggatccgattgaggatgggcagtgggggtttgatgccactattggagatgtgtatagccaactcaatggcgatttctgggtcactggaaatagtgcactcttttatgagagaggtgtagatgtcaatgggtacaggaaaagggtagagcttccatcaggtgcaatatgttagaggttgtggccctttttctcttctttcttcttcttcttcttcttcttcttcttcttcttcttcttcttcttcttcttctttgtgaaagtagttgtttgaggaataagaggttgtggggaagtgtggtttaggaagttctgtatggggtggtgcaagggtgatcaaagctcgagttgatggttgggagaaggcaaagttcgtgggaggcgaaaggagtgagaaggggtttgttgtttataacgaaaggggatcgcggcggcgaaatgtggtagcggcaacggcggtggaaggcggtggcgaagtgaaagagaagtgaagagggaggcgaagaatggcgtgcaagtgcaacccattttggtggttccatcggcacgggaacagaagagggaaaatggtcaaaactttgaaatcaaggcattcaacacaatatcaaaccaacgtgaccaagttatgctcactgttcacactcactagcagtacttgttaaactagtcaactactcactagcacaattttttttttttagaaaaattataataagtgtaaattattgttaaggtgtttatttctttacttaaaaattataacataatagtataagagaaaaaaatgttatgaaaaaaatttactcaatcattcaattataatccacgttatattataatagtattatattttataaatttatattatttgattttttatacgaaatttagattatttgattgaaatactttattaaaaaattttggggaataaatgtacatattacagtcattgcatccatgtctaactccttctttgccttagaatttgactttatgttttttactatgcccgaatttactcagtatagtgtgaaattgattattgaaaaaaataaaataatgtgtgaaattaatttgagttgggttggtccaatttcttttcgagttgtatatataaaatgttaaaaatatatacaatataaaaaaagagttaataaagtcaaaacaaatcaaaatcaaattgaattaataacactcatgtgaagaattctaaaagaaataaaatgaaacttgatatcaacacttttcctagtttgaatcaaatcaatttattttgtattttgtgttttcttgcatctaaacaaaaaatgttattgtttctttttaactttaattgctaacaactacaaaaatcatattatatcaataatcaattatatgtacaattaattattgttataattaattataatcataattaatttttgtttcaataaatttactgaaaaaatgattttaagattcaatttcgtttggaaacaacatacaaaaaaatatcatcctttagatagtaaattacgggggaagaaaagtatgaaactgtggggaaatattggatatcataggcataacacttcttcttaggaggaaaaaagctattgaaaaataattataaacttcaaatcagatatacgaaaacaacttatttttaatataaaaaaatgtttagcaaatatcatctatatatatatgtatatatatatataaatatatatatatatatatattctctaaacgcattgattattttttttaaaaaattataaaaacaattgacatgaaaagaaattaaattgtccctgcacaataacgactggggatgtctttcaaccgtctgtaatctcctttatttctttgtttcttaaacttatatcttattcaaacttttattttaatatttttgaactgtcaaattaaaattttaatttcaatccaaccattgatatgattttaaattaataaaaattattaatttttaaatataatgattgattattattataattattatcttttatatatatttattaaatggaaatagagaaactaataaaataagaattaatgtagtatcaatttaaaaaataataataattttttgcttttataaattaatctatctatctatatcaataatgtgtatatagatatatataaacttgtaatacatttataaataattttataaaacgtgtaattaaatttactataatttataattaaatttatatattttaaagtaaataatttataatttaaaataacttataaacgactaacatatttcaaatcatatgatacattattactgacaagtatataaaaaatctaacgtgcacaaatattttaaaggggactgatttaaaattaataaagaaattaattatgcacattaatgatacattaattagcggttatgatcaacaataaaaattattaatttttatcaataaaatacatttaatacactatttgttttttttatagaatacactatatattaaatcatataattaagtttttgtatccctaaaaaaattgtaaaaaaaatcaaacacatatataagtctaatatattaattatctgtcttattcaaataatatatcttattgatatattgaatcaatgaatatattaatgcattattaataacgtaaaacatattataatattttaattcaatatcaattctatcaataatgtagtaaaatataaaataatgtataaaaatcaattaattttatatcatttttttagacatgtgattcaaaacattttagaacaaaataaaatatctaggtccaatgagagttttcttttacaataagtacaaacacaattggaaagttgaaataaaaaaataataatttaaaataataaaatatatatttttataaaaatattaattttgaaatatatttacgagtcttccaaactccttattaaattataattataaaaaattattttttaaaataactgcacattcaattaaaagaaaaaatttagtaattacacatttatattgtataattgtaacctctcttaaaaaaaattgtatagtctgaaattaatatgacatttttggattgattccaatattttttattgtcaaattcttttcttattcctacattggaatctttctctcaaaagagaaagaaataaccttttatttcaaattgttcctctttttaataataaaggttcatgtccatgtattattttttaaaaaaaattatctattttgcttaaaatttaaattatatttgtttggttgaatgtaaacctttcactttaatatttatttttttatcttattgacattgaaatttattatcctcttttcactttatttctatttcagattggatatttatgttttatctttctcttttcaacactttgcatggtttattcatgtgcaaaatgtttcaactagttgatttgtatatttttctttgtatttttatgctttttcaggcattttattttggcttatttgatttgttgtattgactatttcaataatagacatgtgttgtgacaattttagtattgaaagtgtgtggtttatttttctgtcattttttattttctttttgtattgttaaatattagtttgatctagtgtgaacctttctcttattaacattgaaatttgttatattttttctatttcaaattggttctttatcatttatctttctcttttcaacactttgtatgatttatttgggtgtaaaatgtttcaactaatttctttgaatattttttcatttttctttgtttctttatgcacttttcacacactttatgttagcttatttgatttgaccattttaataatagacatgcgtgacaattttagtatggagaatgtgtggttaacctttttctctctctcattcttgttatttttgtatatattgtcccacatgaagtatttaaatcaaatcggaagaaatcacttttaggtttgggacatagacaagaaattgttatctgatatgtacactgttaaggaagaaatcacttgtttctcaatcattcaacatagtctctttatgtaagtttttcagtttacttcgaaataagctatcaagaaacaaaattttgaagaaacaccgaaagttatgagcatgtatgtgcattggcaggtatattggattttctaatggcaatattgcaattttgatgcttgatcaagaaccatggcatgtggtatggatgaaatacaccatacctctttcaacttcttatggtgagattttctaaaccagcagttagattagaacaataattaaatgacaacaccttataagatatagcttcttgtcattataagtatcttatcaatttcttcaggaaattcaactgaagaatctgacgatacagtggtgacacacgtactgcctcaaccagcagccgagagtcagaggtgatatgcacaaaaccagccttcctttaccacatttctatataattaatttccttttacttgatcaatttttttatgtgaaaaatttcaaatttatgttttcttatgtgttcaatgcagagttctcataatctttagaaatggccaaataatattatgggatattcgagaaagcagatcaattttcagaactggtgggaaaatattacagacaagatataatgaaacagagaaggtgtcttctgcttgttgggtgtgtccttttggaagtaaggtggttgtagggtacaacaatggagagctcttcatttggagcatcccttctctaaacacaggaaatagtttagcaacttattataatagtgaaaacactcctatgttcaaatttaatttgggatataaatcagacaaaacttctataggatcagtaaaatggatgtatgctgaaggaaaggctagtcgactatatgttacgggaggttctgattatgccccttcaaacttgttgcatgtattcgaatactttgcttaaatcattaaaagatatatgctgacttgttcttggttgaatatttctgtatctatatttttctttgatagtttttctttttctgggaaagaaagcctgaattcaagttcacctattgcaaatttacaacttaatgaatttgagatttttggatggtttactttgtactgtattggttcaatgaacttgatctaggtttaatttggaaatttaaataactactaccaatttgtattatatgaagcaggtagtgttgttgaatgagcatacagaatctcgcacaattaagatggggcttcatttgtcagaaggctgtattgacatggagatcatatcaacctcaagaaagcataaacaaaattatttcattttgcttgggaaatcaggccatgtatatctatatgatgataatttgattgaaaggtatctactccaaagccagtctaagtccactccttcactgccaaagggagtggttgtgaagttaccactggaagattcaagcatcacaacagcaaaattcatctccaacaatcccaatttgtttagttctgaagatgaggtaatgtaattgtgaaactgctcttttactgtaccacttttattattttgacaatctaattcttctatataattctattgaatttacatttttttcgtttttgatcacagtattatagtaagttggtaaagaattatccaccacttgttcccattgaaacaaatctcaaagatgggattaactccagttcttccaatttcactggattttcaaatattagaaacatgtacatatctggacacagcaatggagccataaatttttgggatgcatcatgtccctttttcaccccaattttgcaattaaagcaacacgtagtaattttatccgaagctattagcttgagtcaaatattagctttattacttcgagcggtaagacaatattggtttgtgcccacacattaacaatattatattccagtaagagtatatttcagtttcagaaaggaatctgctttcacgtgtaagcatactagtcaactcatatgcctagataatgaaataatcttgattgtactagctaaccaaagtaatctgattttttgaagtcctattgaaaatagtaatagattgataagaatatttataaatatgcttagaagtacctacataaaacaaaatagtattctactttttgaatactcaagtatattttagtcttaagccattaccagttttttagttcatttctaggagcattgaaggcagttatttctttcttatgtatttaacaattgaaggaaacatatttatctgtttccttcatcttaatgcagagtgaaaatgatttttctttaagtggtatacccttgacagaattatattttgatagcaactatccactccttgtttctggtgaccaaagtggaatggtgagttccattcaattatgaattttgtgaaatgtgatattttcgtttttctattctaatcacccatgcttattttatagtatgtatgatataaacatgatctgcaggttcgtatctatagattcaaacctgaaccatatgcctccaatagcttcatgtctcttactggtattgtgtagcgtgttactttgtctactgctagttccttagttattaaacaagcatcagacttcacactttagtcggtagtgatttgcattttcattcctattttacagtaggtacaaagaaagggactgatcacgtaatccacagtatgaaacttataaagactagtggtactgtaatttgtgtgaacatagatcacaactcaagtgaatgattatcagataaatttttataggtgataattactaatcatatcattgcttgaatgattatcagataaattttttaggcccttttgatttcagcgcatagttggtgctaatttgtgtaataatgtaccattttgttacaggtttcagttattaacatagatggaccatctttgttatatcggaaacatattgcaagtgaaatttccaccgatatcatctctctgcagttcaaaacctgcagtttgcatggttttgagaaaaacattttagcagttggaacaaaggactcatatgttctaacactggacggtgaaactggaaactcattgagcattggaactattcatcctaagaagccctctaaagctatatttatgcaggtgttgggtaagagtttgcatagtagaaacaatagtcagtttctaaaatacattgatttaaattatcaattatctaaatgcttattatgtttagaatttaaattccaatgctattttttataccagtgaaggatctgattgaaaagtgttagactttatattatgttatacagacggacaaggagaacaaatcacaggatcagttacaaaagatggcttagagttgaaagaagggattcatattgaagatgcaacagcaaagcagttgtacattctgctgtgttctgagaaggctttgtatgtctattcttttgcacatgctgtacaggtaatgtgttctttatttctgtccttactcgtgagtcatgaatgactaaaatattagctgatgctcgcggttactcattctcatatgtttcagggtgttaaaaaagtgctttacaaaaagaagtttcattcctcttcctgttgctgggcatcaacaatttacagcctctctgatattcgtcttatactccttttcgccagtggaaaagtagaattaaggtggtgattttttcttaagtcggtacatacttttaagatgaagaattaatgagtatataacatgggaaaatatttaccaacaactggtgttacaattcaatccccattttgaggtttactttttcaataagaaaaatgctataaccaatccttattcccacttagtgcttttggctttatggattttagcacgttttatgttgaatcttgaatcaagtgttctgaagccttcttcttcatagtgtcccttcgtgtcaacttcatgaaacattcttttttcatttaatgatttaacaatacatatgtaacaatgttaggtctttgccagagttatctctgatagtggagacttcagttagaggtttcacttattcgcctccaaaattgaagtcatttcctgatagccagatatgttgttcatccaaaggagatcttgttttggtatgactgcagctttcacttgtacaatgttttaaataaatttatgacataaaattaactcaacgttggtgtacaagtgaatggtgaccaggaaatttttgtggtctcattgttggcccaaaggaatattttcatgtatataagcctagagaatggtatagggaatcttgtatcaatctttaccacataaaaagcttctgcctggctataggaaaatatttctcaatgagagagatatttacaatttacagcctttttttatcttctatactattttcgtttaaaactggtaaaatgttagtctcatcgtacattatacttgactttgttttaggcttttggactctgttagctgcatctacaggaaggaaaagatgccatcacaataagagcttcttcctggccctgtcatccataaggaaaagaaaagggtaaacagtagcattttaataacttatagaaccatatccactctgcttatgactgaaggtatttggtactgtgttttggcattccagggtatattcagctctgttatcaaagattttactaacaataaagaaaagcatggacccctcttggaaaagaaagataccaaagaaagtatacgggaactctcagcaaagttctcaaatgcaaactttgcatgtaatgatgatgttgataagcctagaatggatgaaaatcagcttgaattaaacataggtaaaacaatgcctcagacatgtgctacactgctactgcctactgacatttgcttaaaacttttggccaagaaagatgaaatttgtcatttgtgtcaatgaattcattttgtctatttttattggtgaccttgactctgctaatcagaaagcacatatgttataaacaggactaaattacagtgatagattaattgcttcctaaggaagcttctatagtatattttctaacatacagatccttgaatttgaggtaaccaacttgaggtgttctcttttcctcccatatagatgatattgacctggacgttcatgtagaaaaatgcaaagaacaaagcatattgggagctcttaataagaatacattggctggcatatttcagtctctgaaaggtttcttgggacaatgagttcaattttatgcaaattgattttccttatgtttcatcatttgacctaagaaataagcacttaaactactgcgaatgggatgaaacataagctactctagggtatttacagaagtcagaatgtcatgaccgcttgtattttgtcatttggttcatcgcaaaataaattggtcaggctagaacaaactctgttgggtaaagtacagagataatgcttaatgagatatcgatgctttggcctatatccataatgaaaaggagaaaaattaatacctcaatatgctataatctgtcaagtaaggtgagctaatatagttctagcatatgttttatacttttttttggaagaataccaatttaagtagaggatatttaaccaaaaatagaagataaactgaggggaggagcataaaatgcaagacttcgtttcaaggaaacactattcatagagtaatatctcccatcctgctacttttctactatactaatttgtattcccattttttttattgacactaccttactataactaagaaactgtcaactaaaattgtatctgttgaatgtaaaggtgcattatagttacaacttttcctaattgctatctaatattgagcatccaatatacaggaagattgaaagagatgaagggaaacaaccaaaaaacatcagataaggaagggcaacaggataaaaaagatggtgtgcttgatcaaattaagaagaaatatgggttttcttcttcctccaatgtatgaatatatctatcacatgcattctcatcatgctcgacttttctaccacataacaattcacaagcatggcattttatgtgctcatttacaagcgaaaggtgttgcctaggccatattgctaatttctaatttggagttgtcaagtgtatttttaatgcaaacatagtgtgacaatcaagattgatcaccaagtatctttaatctatgatttattacctactcattagaggttttaatcagttgtactttgtgtcagtgttctttttattcttctgctaataaagtagcacttgatttaattctttcctttcacttctatactctagcatgctaaacgttgtataaatttcaaaatagtctcaagttaattttggacgaggtagtacaaaaagagacaatttttcaaacaattattctatcataccttcgtttgaaacttgggactatctgtggttattacgcagatcgtttgatactacacacttaatgattatattgatgaattttttcaatctttaaagttatgtaatcatcaaaattataggacctgtagacataagacattcttagtttcacaaaaaaagaagaaagttaaattattattttttcctctgatttattatttaggttcaatttgatcctctaattttttttagtttaatttgatcctctgatttctttttggttcaatttgatcctctaatttttaaatagattcaatttggtcatttaattttttgggggaaatttacattttgtagctgtttaaaaccacttggtgacagtttgaaaggctaccaagtatgatttcttaccatttagattgaaggactaaattgaatcaatttaaaaaattaaatgaaaaattgaacaaaaataaacaacatgatcacattgaattaaaaaacaaattaaaggattaaaaaactaatttaacaaaaaaaaagatacaacgatacatggaaatgatgtaattttgatcattgtataattagacagattccatatatttgaaccttcaattttttatgctgaaatatgagtgcaaacattaatcaatcatgaatctggtgctacaggaatcagctgttgcaaattgggcacaaatcaaactgcatgttataaggaaattgcaggtatcttgacaaaaaatagttcaaatttcactatcctatgccaatgtacacaagaagaattgaaaaaaaatagagaacttatttgtttacatatcttctaactttgcagggtaccaaccttcgtgccacagagatgcaagatacaacaaaatcattttcatcattggccaaacaagtgctgcgaactactgagcaagatagacgaagttgataaaaacctattagttaatttattatacttaggtcatgattattttattttttaattgcacatatattatttttaatatttttatacgttagtttgttcacaattatgttgaactcactttgttttacactaacaacagcatagactatgatgtctgaatattttagttttggaaaatccgtctcccattccttggttattcaaactcaattaagatttgcactttttttctcactaaatagtattaacccatcataatttattatataagttaaaggtatgagttcagaccacaaacatgtttagtgttttgttagcagatcttccaattgtgagcgtatctgttctctaacaacatctctgttactaacgcttaatgcaaaacaagttttcgatgcatgattccgcaaccttgctactgcagaaattgacaacattagtcattagtcattcacaagttcagcaaagcaatcggcaagagagtttgtccaaaatcctcaatcctcaaggatttagtcctatcttgtttatacaaagaatcaagtaaagaaaacatgttcctacgatgcgaaactatgggaaaaaatcaccttttggtatgtctctgccaaactttggaactggaatggaagccaaaactaggatatttgactccaaaactcttagaactgcagggaagaatggggaactgaataactccatcttaccaacatcatcaatgatgaagagatcggtgtcttctctaacctattcattgaaagtatcataaaagctcaaggactatgacaaataatactttcaacatcctcaatgacaaatctacattcataaaataaactgcagctataaaatgcaggggaacaattgcagagtgtaacaccccaaaattttggaaccacggtcaattattagggtaaaatgttaattagagatagtacaaaaggatttaggaaaaatgacgaaaatacccctgaatatttcgaaaatgaccaaattgcccctaggtattttagcaagatatttaaggaggaaaatttataaatactcttgggtgtttgaaaaataccagaatacccttaggatgacacttacagagatatcctgaatatttttggaaatgacgattagggtgagtggtgaaattaccaaaatgctctttaggtcaaaaatgtccagatgactttagaaatttgtgggaacctgagtattggataaaatacttttagataaccaattatcaacatggttggtggcagaaaaccataaactgtaatttctaggaattttggaagatattttgaaaagagcttaatctagactacctcaagtatcagagcattataagaaaaggatggacataatctatagaattttctcttaattatgggagaaataagtgttctaaatgagttagtttagtaattttaataattcaaggcaaaatggaccaataagagattagaatttagttattacatgtaataaaggaaaaattggttgatttggatttctaaactaagccttgaccctatgatacaagatcaatggagaaaagctttaagaaacttcaagaatggacacatggatgtttaagaagctaggatacatgccattggtgtaacaccccgtaggcctccgacgtgttatcattaataatatcagattagcgtataaaatatcaattaattggttcagcggaaacataggatcgttttcttgataccttatgtatggaaacacataatagaaccataaaaacacgcccctactgatccagtttatcaaactcaacataataagacagataaccaagctttaggctgagtaacagcaatataaacatacacatgtactcagaggaaagtctcatatacatagtatccaagttctgtataatatatacatctcaggttcacaccacacacggtgctacaaaagaatataatccctcagaaggggtgtacagaactataacaaaaatacatcaaaatggagccctcaagctctctatactgctcctcaactaggcagcctagtctctgatgggcctcttgccctgagactgctcttctcgtcctgatggttcacctgaaaccacataaaccccacacggggtgagataatatatctcagtaagctcaggatccatggaggaatctcctccaccctggcccactaacatcataagcacagcaacaataacacaaacagatggctcaccggcctagcctctgattcatacaacattgtaacataacatatatgcatagtcaaacacaatagagcaggaggaattgtctcctgtattaatgccacaaaataggaggaattgccatctcctatattcacatctcagagcaggaggaatagccatctcctgtgctagcattcagtagtaggaggaatagccgtctcctatatcattgtatcaaagtaggaggaattgccatctcctttaacaatatatccagcaggaggaatcgccatctccggggaggaattgccatctcccatactatctattggccaatagagctatctcagcacaatcacaacataattcaaacacagaggcatacatatatcatcacaagaatgcagatatccatgcatgcattatgaatgcccacaactcccttggagtgtggtgtgacacacaagatgggaatcatccccagggacactgaacttacctggaacaatatcactctgtggtctagtcccagctctgtggctcccgccaccagtaaactcaggatcaacgcctatacaaggcatatatatatagcccatatcaatattcagaccacagacatcaatcacaagtatgtaaccatataagtcccatatcctagggtttaaccattttagcctagcacacactaggccataatatcataacgtgaaggctatagcatggcagaaaccatcagcctcctcagacttagaaaccgcaggaatggcctaacctccatcaaggtgctattcaactagcctcacaggctcataacagacatagtctaggctctggaatggcctctacactaatgtagactcaacacacaggccacacagacaaaccacagagccaaaatccaaagtcatcagaatcaaaaactgaaagctaatccttcatctatacgaagctctgatcaacttcctcaactagaccctgagctaattctagtcccagctcatatgagtcactattcacagggacccccagaatcaaaatcaaacggtgaaatctaagtttcttacctcagtggcgcacccaacagcctcataacagtttctcttagcttccacgttccagttacgctgtggttttacgccaagctcgagtcctctgagcttttccttctgaggttccttttctcactcaatctggggtttacaaggaaattgatgaaggattcaagctttctactctgtgcaatcaagtttctaaggctcaggaaagtgtttaggctgagaaatcaagtcctaggagctcaaggacttcaacaatggaggttggctcaagggacgaagaagaaatggaattccttccattttctcacgttttggcctttaaaaactggtctgccgacgttcccacgcgactcacttggcctcccacgcgtttcacttgagatggcagacagaaataccctttctgagccacttcccacgcgactcgcgtcgtctaaccacgcgactcgcgccataccttctggccttccacgcgacacgcgtggatcccacgtgactcgcgtggagcctcagagaaaaccatgttttctgggtcacttgccacgcgactcgcgtggatcttcaagtgactcgcgtgacatggcagagccatctgccctggaaagcacatatggcgcgtgtcgcgccacacttcaagtgggtcgcgccatataccagaacagccataaaacttgcattttaagcacctttcaacgaattctaaagctattacctttggcgccatcaacgccaatcctggtgccaccggcgccgcacccttagcagggttttctgacctgaatccccgcgctatcgcgcggggttaagcgccgaaaatgaaagtccttacaattggtccatttgtaaagtaaggtaataataaactaagaagtttttgaagaaaacttccttttgactcctttggacacgtagaccattctaggtattatttcaaaaatcccaatggtcaaaagttttatatattggatagtaatgtacccttaaaattttaaagagatccaacggttaacaaatccaaaatgagtattttaataaaataggctttggaagagattttgtaactaagctagcaatccacataagaaagcaattgaagacttgacctacaagcctgaactccacgtgcaaatggagaagaatgtagaaaactcaagaactaggacacttggagggtgcaaaatgcctagccaatgaggagaaacctagtggaaagtaagttatgatgacttaggaagattttgtagcacaagcaagctattccacataaacaagcaaggagtgctctccaagaaatgaagttccacgtacaagggagaaggagaaagagtagtatagaagaatcaagacacaagccacttggacggtgcaaatcaactagccaataaggtggaaccacaaggaaagctagtcattatgaccttggatgatatttgtaataaaaatcaagatttaccaccttatataaaagatgtaaggaccgaaatttgggctgtcctaagggaaagaaacgtgcacatccgtttccaaaatactcctatttcattcctttctaattctatcattcacctagaacaaaaaataaaagcctatgccttggaagtccacgtgaagaatcaagaaagaaggctgtccaaaagcttaaggaaaacaaggtatggggaagtttatgataagcaagtttgaatattcattttgttgagattcttaattgttttcataagaaaccaagccttgtatgttaggtgtttgatgaaatgcctcaaagagataaagattgctaaaggaaatgagtatttgaataagtgacttgatttggttaatgaataaatatttaagtgaatcacttgaatttaacttaatagataaatgttaagtaatttaattttatatgtattatgattatttttttgaagaaaaaggttgattagaattgaagttatataatgaaatatgttattaaagttaaagtgttttatgttttactaaagtttataagttttgataaaagtgtgttccaaacccttgaacatgtctatttattcttagaattatgttgaacttcataaaaattaatgtttaagtggttttctttaaagtattctatgaattcaagcatgcacaccatgtgtttgataatttgttacaatgaatgaaatatgtttaagagttgttggtttgaatctttattgttggatttgaattatatttgcatggttgaatgctttagcaaaagttatgtatgatttcatgtgttgctgagtgtttttatgaaagccaccatgtgttggatgaattgtcttcaagagataaaaatgttttaagaaatgaaatatttgagagttgatgaattaggacttgttttgagaactgtatgaagtagactatggttgtatgactatgacttatctgtgaagaatttatggagttgaactatggctgtatgcttagatgttgtgtaaagctttatgtgatggttgaaagaagctttacatgttgtttaaaaagcatatgccatgagttatcaaagatgttgagctttgaggtgtatgtgatatgagaagaagaataatgattaaatatgtgataaaagtaaatcattcatgcattttcatatgcatatgcctggcgggggctagtccgtgaagttgtttgtcagatagctaaactgagtccatgcgttcagaggagtctgaacttgggggtagttgtatcagtgaggaccacaccaccatgatgatcacataggtggaggtgacattcctacgcgccactgcgctaccctgactgaatggataagttcgttccactaaggtgagggtggggctatcttgactatggccatttgatgatgagatgttgagaaaatcatgcatcatataaagaagatgagcatgcatcataagcatcacatgttgggtatgttgtatgatgttctgtatactgtatgtgttgtgtgaattgaagttgcaccctattttatgattgaggttttgaccatctgtgtatatatttgtttattcaaactatgtttgtcattaacttaccctattttgtgtctatggttgacacctatgatgatcccaattcatttgggcgagcaggagaacaacaaaacaatggacgatgttgaagaatagaggatgaaaatgtttaataaagcgtactttaattatgtcttgtaatttggactagacgtttaatcagttgtatattatgttggactgtattaaattctatgttgtattgatggattgtatttaccgtggtgagaggaaattgtttatgttacgcacgaattgtaaaatcgaagagagaagaaagaaatttttcatgaaatttataactaagataattctaatacaaagtggacacgagatttcatctaaaatcaatcaatcacgagagggtaaaatgaggcgttacaatggtggtatcagagctaaggtttgttttctaaggactgtatgcttgctatgttgctatgtgcatgtgatgttttataagtgataagtcttgtatgttgtgtgtttctcagtgtttgctatgtgaagtgttctatgtgtttgttgtatctctaggaatatatgtttcgtaggttgatctgaaccatgaattgggttttctgtaatatgcttttgaaggattagaaaagtagactaggttttaatctacagttgagaaatttcttggattaacctaattgaaattattcagacaatatttaaggttgttatttaggtctgaaattcataattattttatgataaaactaagatgattttaagataagaagatgatctctaagttggaatattagtgaggttggaattataatggatgatttatagaaagtggtttcagtggttttgatgatatttggggattttgtcatattttatgaactagttgaatttatcagtgaagaatgaatggtataattgtttaagtattagaataattcaattttgaggattaagtagtaaggtggtaggtgaaagaaaaattaaggggtatattaggtttgaatttttgagaaggtttaaaagaattagaattatttgaaaaatcaattgtggattattagattcttgacatgattttttgttgatacgttatggtcaagatgataatgatttcactagaataaggtatggtgatttaatctcacatgagataagtaagatgttaagatagaaaatattttcttaagatgattggtattggtttatggactaaggagattggacgaggttgtcagaatatgtggtattcctaatacttgctataccataagtttccacacatattcataagttagcagactgaccacctggataatttgtgaattgcaaaggaacattatggcaagcaaccagaaatacaaataaatgactaatcggtgatttttaggtattaactttctatagtgattaagtaggtcaatgattatattaagtggtgaatatgttgatggaaggatggaataatgattagcaagaattatggtatacgatgttctcaagattggaggttaaagatttagtgatgatttagggaaaatctttaagaggttatttttggagaaataaaggactcttcaaggaaaatatggtacttatgctagatgggtttagtgtgacttcgagtttcttagtgggtagagaaaattaaattttggtgtcctctgtggatgataagctaatgattaagaccacgattagtatgtcttgatttctgatgtgtttatttggtggaaaaatttctgagaaaaaatctatgttgatctgatctttctgcctttttgccaaattgatgataccttagaaataaataggttaccttttgatgcatctgttttgagtgccctggctgttgtagctacgatgcacattatgaatccaaatagatgaaaacttggttctcccttcatccatgcaagtgaaaagatatagtaaaaatcaataactatagcttgtaactccaagcagaaccgcattttcaactacattaatgacatttacacctagcaaatctagcataagaaaaaaccatccccaaactacattaataacaggctaaaactaatttagagaacatatttaaaaggaaaattcaaagtcttacatattcttaaagcaatagacttaacggcttagattcttaaacatcatcaaattaaccccgcatacacattatcaattttctgcatcacattcgtgtgttttaattattttattagtaagagcacgtattaattttcttcaacatccttgtttataatattataacaggcttaaaaaaaaaggattgactcccctaatatacgcagtgattgttaaaggatcaatttcaataaaaaaaaaccattgataaacaaaaaaacgcatggattttggagtcatcagtcacggaatatataaacaaaaaaatgcaaaccttcaaggcttcaacggtggtggcgcgacgaaggttgaagatgaaggtcgagatgaagcttgaacagacggaggtcgcgaggccgaggcttgaagacgaggcccggtcgcgaggtgtgtgactcagtgactgtgtgggctgcactgcggatgaaactaaggaagaagaaaaccaaaagaatgcacaaagtgaaacgacgttgttttgctttaaaaaaaaggccaaattttaatgtccgcacgtgcggacattggctaccgcccctactttagaaaacacgagatttcaccaatccaggaattggggtagcctgcatttccacataggagacactctctgaaaacacaaactctctctcaacttcccctttctctctaccccctcgatagtacacatgcacgctcctcatcaactctgtaatccacacacccaccaaggaaataaacaaacaaataacgaaattccaccacctcacaaaaaaaaatcacatttttcaacgaaaaacgaaacttggaatgaaaatgacaagggaaacagaatctgggtcatgagagagatgcatagtgacatacatacctggttggagggtgttgttgaaaactagtaggttgatgagcaaagtggtgttggtgtgcgaggaaaccatgaaggggtcatgagaataagaatgagaaaaagaaagagataagaagcaatagcataaagcatggacctaatagaaggaatagaatgaggcaaaaatcagcttttaagtgcaagtttgattttatcttccgcttttttagttggtttctgatcaatttagaatcattcccagctaaaataaggtacttttgctctttgtctttttcttttgtcacctccttactctcttttttctcttcatttatttttttcaccttttttggttcgatgtaaatttattgtgcaaccgtttaattactccatcgatgcatttacttgtgaatcaaagtgattttcttataacaagttagtgcagcttagtgtggaaaataagaaacactcacaattaaccaagaggggaggtgaattggttaagtatagatatttaaaattttcttgttcaaaaatcagagttaaaaatgccctttggatctttaatacaaaactaaatgaatatccttatccaagttcaatccaagacttgttatgcttatattttaaacacagaaaatagagttcaatcagaaacaataaagaatgcagtaattaaaacaagaagcaagatttatactagttcacctcaaaagaggctacatccagtttcttctactcaatactagagtagagttctactattgcaaatatatttcttacaagatattacaaacttctctttctcaaccctagagaaagttcagtaatctaaaaccctattagacccttagaagctacacccaaactgagaaacctactcagttgtacatggagaaatcctatctcccttgcaagaaaaccaacttacaatataaccaacaaaaacaaagttactgcagaaaaacgaaatacccacaaagatttaggaaagaattcacctgatgatccaagatagaagtgcatatgaatgagaaacctcaggttgaatgtaatctaaagatgcagaatcaattcctaagcctttgtgactgagtaagcttgcttcactaacaatcttagtgacccatcaatgaatcattggaagcaagactcaagaacccagaagaaacctttgtgaactgctagatgcctttagagaatgctcagaaatcgtaaaaaatcaactcagtaatgatctctcttagttgttaattcaaaaaggcaaagggttctatttatagttgaaatcgtaacagagttaatcgattaaatgcgctccccacgctcctgtaatcgattaaaatcattaatgcagaatcagatttcaactaatggttaagataatcgattaacccgatgcgtaatcgattaaatcagtttgagcaaaaatactgatagtaaagtgtaatcgattacatccaattgtaatcgattaagtcagacatatgttaaaatcaattttatgaagaataatcgattacatccagtggtaatcgactaatgcagtcctacacttaaatcatgtttgtgaagaataatcgatcacatctaatggtaatcgattaaggcagagtgactaagtttatccaatgagcatgtaatcgattacaacaccatggtaatcgattaaaacagtcacacgaccaaatttcaagtatgttgagttgtgtgtaatcgattaacccgataaggtaatcgattaaagtgtttatgcttggttttccagaaaccttaagaacaaaataatcgattaagatttagccagtaatcgattattgcttctatatgttgttttcttagctttctcttaagtttctaattaactacttaactcctctatgatgcaatacttaaatgatacatgaatgctataatggcttggatcatcatgatgctttcaatccttttacattaaatcacaaacaatcgtcttcaatgcttgagccatgttgaaagccaaaactccaagacttgcaccttgattgaatcttcacttgatcttcattcagctccccctcaactcaacaatctccccctttttggctttaaacatgccaaatttccaattgaaaagcaatgggtctttgtgattgaatgagaaggcttccagtattttttgtactttgcttatcacctgaaatatcaaaaattctttccaagaacaagtgttaaaggtatctgatctttaatcattattcattcctaatatatatgtatctttagcaagcattttcaagtcttaactcccccttaatttctcaatttatgcaactgaaaatttggttaaaaaatgacacgaaaaacagaggtgaacagagtatgatgcagagcatttgcattttcatttgattttcaatttttctccctctatttggctttttaaagtcaaaaattgaatgcacagcggataattgataaacagaaggcataaattttatttatagagggtaagcagtacatttgaatgccgaaatacaaagcagaaaaacagagtacatgaaaacacgaattttattgatgtaaactaaaagttacaaatagaaagcaaatcagacaaacactaaatctaggtttattacatagagagcagatctggcaaaaaccaaatctagtgaatcctaattctagaaagcagatcagacaaaatctaatgaattctaagctatttgctgatgctatgtccttttatgctttccattaacaatatccagactctctctaatgactttcaagactccatataacatagccttgatatcctcttgaagctctagcatggtctcagccttaaggtcttgagaaggataattctccaggtttccaaggtttaaccataatgatttgaaaaagaagactcagactaagaaatggaagagaggattggtgcagattttccaaaggcaggcaatagctatttatagagaataaaggcagtttagtgatcaacatctcagaagatgtaactgttgggaacgaatttaaagcattggaagttgcacagattctgagtggtcagttttgatggcacatagatacgttcaaacttttcaactaagcgccctaataatcgattatgtctaacagtaatcgattgttctatacaatgcttagattactgaatagatggtcagaggttgaacatgaaacataatcgattgtaatgtaaatgtaatcgattatatggccattaatgtttttagaacttgagaatgaacaatttaatcgattaacttttatgataatcgattattccagcacgtcctagaatttcaatgatgaattagtaatgtcgtaatcgattatcccgataggtactccagagtggcatacattaagctttgtgaagcgtaatcgatttcaaaccttgtgtaatcgattataatgacttgattttcaaacaggattttagttttatttaaaagaatcgattattccaatggtttaatcgattatgtcagcacgagaagtagaaaacaggttcttttatcattttgcacagcttgctagttttggatgcagagtataacactaacactatgacttttaaagtatagaatcagagtatttgatggtaatacaactttttatattagtattggtaataataaaggcaaataagcatacaaaattgcacatataccatatcatactcatgctagcatatgttatgttcatccaggattcctagcatgtttctaagagtgtaaaatctatccttaggcaaaggtttagtaaatatgtcagcaagttgatgatgtgtatcaataaattctaccttgatgttacctttttgcacgtgatctcttatgaaatgatgtctaatttctatgtgcttggttcttgaatgcatcacaggattctttgaaatattaatggcacttgtattatcacacagcaatgggatcttcttcaactctactccataatcttgtaattgttgcttgagccaaatactttgcgcacagcaactacctgctgaaatatattcagcttctgcagttgataaagccacacaagcttgctttttgcagtgtcaagaaatgagtgagctttcaagtagatgacaagttccactagtgcttttcctatcaagcatacatcctgcaaaatctgaatcagaataaccaattatattaattgatgcatctttaggataccagagccccactttgggtgttgccttgagatatttgataatccgttttacagctgaaagatgagactcctttgggttagcttgaaatcttgcacacaagcaaacacttaacattatatctggtctgctagctgtaagatagagtaatgaaccaatcatccctctatacttggattcatcaactttctttcctctttcatctgaatcaagataagttgaaatgatcattggagttgctgcatctttgcatttgtccatttcaaacttcttgattacttcacggcagtacttggattgactaagaaaggttccattcttcaattgcttgacttgtaatcctaggaagaatgtcagctctcccatcatagacatctcaaattcttgttgcattgctgcagagaaatctttgcaaagctttggattagttaaaccaaaaataatgtcatcaacatatatttgaaccagtaaaatatcattgttttgcttattaatgaacaaggttttatcaacattgccccttataaaagattggtcaagtaaaaacttactcaatctttcataccatgatctaggtgcctgtttcaaccagaaagggctttcttaagtttgaaaacatgatttggatgctgaaaatccaaaaatccaggaagttgttcaacataaatgtcctcctcaatatagccatttaaaaatgcacttttcacatccatttgaaaaagtttaaatcccatgatacaagcataagcaagcagcagcctaatagcttctaaccttgaaactggagcaaaagtttcctcatagtcaataccttcctcttggttgtaaccttttgcaaccaatctagctttgtttctgactataattccactttcatccagcttgtttctaaaaacccatttagtaccaataggcttaatggatggaggtttagggacaagttcccaaacttcatttcttttaaattgatttaattcttcatgtatggcatgcatccaatgttcatcttgcaaagcatgattgatatcttttggttcaatttgagaaacaaaagccatgtcacaacataaatttctaattgaagatctagtagagactccctttgatacttcaccaataatgttgtctagtgaaagatctctagtagttctccactcttttggcaattgttttggtgttgatgaactttcttcaacccttgattcattcttttcattgatagacatcttttcaaattgtatattctgctcttctttttctgcatcatcatcacaagctttttcctcttttgaggagttagattcatcacaaattacatggacagattcctcaatgcacatggttcttttattaaaaactctatatgctttactttgtaatgaatatccaaggaagatagcttcatcagcttttgcatcaaacttcccaagtgattcctttccattgttcaaaacaaaacacttacagccaaaggttcttaagtgtgaaacattaggctttcttcctttatacaactcatagggagttttctttaaaataggccttatgagaaatccatttaaggtatagcacactgtatgtacagcatcaacccaaaaatatttgggtaaacttgtttcatttagaagtgtcctaacaccttcttcaagtgatctatttttcctctccacaacaccattttgttgaggtgttcttggagctgaaaaattatggttgattccattttcttcacagaatttttcaaaatcttcattttggaattctccaccatgatcacttctaattgaaacaattttacattctttttcattttgaataactttggctagttttcgaaaagattgaaaaacatcactcttggattttaaaaacaaagtccatgtgaatctagagaaatcatcaacaataacaagtccatagtaattgcctcctaaactcatggttcttgaaggaccaaacaaatccatgtgtaaaagatcaagaggtctagaggtggaaacaatgtttttactttgaaaagagatttttgtttgtttccccttttgacatgcatcacacaatttgtctttctcaaatttgagtttaggcaatccaatgactaagtccttcttaattagcttattcatatgatgcatatttatatgactagctctcctatgccacaaccatgtttcatccaatttacttaatagacatgtagttttgtgaaacaaggcatgatcaatagaaagtagatacacattacctttcctcttgcctatatgaattacctcattacttttgccatcacaaatcaagcaacaatcttgattgaaggatatcttgtagcctttgtcacataattgactaatgctgagcaagttgtgtttcagcccttcaacataaagcacattgctgattttagtgtttaagttgtcaccaatacttccttcacccataatctttcctttattgttgtctccataagtgacaaagcctctttctttaaatatgagattcttgagcagagacatgtcacccgtcatgtgtcttgagtatccactatcaaggtaccatagagatgagcttgctcttagacacacctcttcatctttacttagcagatcatcattttcctcattgatgatgaaggttagacacatgtttgcttcttctaaatcagcagaggaatcagaggtagaagtatcattatcttcccatgcaatatatgcttttctcggtttgaattccttcttccctttgctgtcctgctgttgtttcttcaagtatacggaacattcagattttatgtgaccaagtttgccacattcaaagcaagtatagttgttatccgtcttcttgaagtttttggagctgctgtttgttgaattgttcttattatttcttgagaactttctgcctttgtttttcttcatgaatttgctgaatttctttactaacaagttcatgctttcatcttcctcttcttcactagagtcctcatccttttcagccttgggtgttgcagattttagtgcaattcctttgtttttcctatctgcatcttcaccaaaggttagctgagatagttcaagttcatactcaagcaacttaccaaaaagtgcagccattgacatctttgataaatcctttgattccttgatagttgtgactttgggttgccatgctctagtgagacatttcagaatcttgatgttgagttcttcagcatcaaaggttttgccaagtcctaggagatgattcactatgtgtgtgaaccttgtttgaagctgggaaatactctcattttgattcattttgaacagttcatgttcatgaatcaaggaatgctttcttgaccttcttacttcctcagtaccttcatgggtgatctccaacatctcccacatctccttagcacttgcacatcgaacggttttgaaaaattcatcagaagatagagcagaagttatcatattctttgctttaaaatcatattgaacaatttttttctcatcatcattcatctcatcccaatctttgggaatcatgttgttatctaccatcttaataggcattcttgggcctttctcaatagcattccatgctcctggatcattggattggataaagatcttcattctatttttccaaaagctgaaatgctccccctcaaataaaggaggtctgtttaaggatgctccttccttaaaggttatttgtgaggtgttcattttaataaaaatgcagtgatcttgagtatcttacaagacctagctcttgatgccaattgtggaaaatatgaaacactcacaattaaccaagagggggggtgaattggttaagtatagatatttaaaattttcttgttcaaaaatcaaagttaaaaatgtcctttggatctttatcacaaaactaaatgaatatccttatccaagttcaatccaagacttgttatgcttatattttaaacacacaaaaaacagagttcaatcagaaacaataaagaatgcagtaattaaaacaagaagcaagatttatactggttcacctcaaaacttagaggctatatccagtttcttctactcaacactagagtagagttctactattgcaaatatatttcttacaagatattacaaacttctctttctcaaccctagagaaagttcagtgatctaaaaccctattagacccttagaagctacacccaaactgagaaacctactcagttgtacatggagaaaccctatctcccttgcaagaaaaccaacttacaatataaccaacaaaaataaagttactgtagaaaaacgaaatacccacaaagatttaggaaagaattcacctgatgatccaagatagaagtgcatatgaatgagaaacctcaggttgaatgtaatctaaagatgcagaatcaattcctaagcctttgtgactgagtaagcttgcttcactaacaatcttagtgacccatcaatgaatcattggaagcaagactcaagaacccagaagaaacctttgtgaactcttagatgcctttagagaatgctcagaaatcataaaaaatcaactcagtaatgatctctcttagttgttaattcaaaaaggcaaagggttctatttatagttgaaatcgtaacagagttaatcgattaaatgcgctccccacgctcctgtaatcgattaaaatcattaatgcagaatcagattttcaactaatggttaagataatcgattaacccgatgcgtaattgattaaatcagtttgagcaaaaatactgatagtaaagtgtaatcgattacatccaattgtaatcgattaagtcagacatatgttaaaatcaattttatgaagaataatcgattacatccagtggtaatcgactaatgcagtcctacacttaaatcatgtttgtgaagaataatcgatcacatctaatggtaatcgattaaggcagagtgactaagtttatccaatgagcatgtaatcgattacaacaccatggtaatcgattaaagcagtcacacgaccaaatttcaagtatgctgagttgtgtgtaatcgattaacccgataaggtaatcgattaaagtgtttatgcttggttttccagaaaccttaagaacaaaataatcgattaagatttagccagtgatcgattattgcttctatatgctgttttcttaactttctcttaagtttctaattaactacttaactcctctatgatgcaatacttaaatgatacatgaatgctataatggcttggatcatcatgatgctttcaatccttttacattaaatcacaaataatcgtcttcaatgcttgagccatgttgaaagccaaaactccaagacttgcaccttgattgaatcttcacttgatcttcattcagctccccctcaactcaacacttagatggaatagattatatggtgcgaatgaagctatgattatattgcttctagatttttacgaattttttttttgtggtgaaacggccaattataaatgccttaaacgttggagagacgaactgctatgatgcgtttgatttttatgaaacatttgatttactacttaaaattattattgataaaaaatcattttgattttaaatcttatatttaaaattttagtatttttttacagcaaataaaaataaaaaattattaaaattttagtcttagataatttttttataattactaaaaattaatccctactatttttgtttttaaactaaagattaattcttagtaatttaaaaattataagaatgaaaaatcaaatttataaaaagtataagggtttagattaaaattaatataacaacaaaaaacatgttgtgaaaaaaactaaaaacatatttattttaattaagacagtacgataattatattataagtttcctattcataattaaattcatcggttgttcacaatttattatccgaatcaaggttggctaaacggctaaagataaagtctaacaaagttagtttgtttttctaaacaaaattttttatacacaaagtcaataattgaaataaataatgttttaaaaattatcattattgatatattttatcttaggtttaattgctttagggggttcttcagtttcaattatatgcaatttctgtccttctaaatttttttgaaagccaatgaagtcaatttatttttaaaattaaataaaattagtctttttttttttataaatccttcaaattctcattttctactaaatgttttacaactaaaatgattaaattactttctctagttccaacttactaactaaagcatcaaatctcacctagaattaataaataaaaaatatacatataataataataataataataataataataataataataataataatatgagagctttaaaaacaaaattttaaaagcagtaaaaaaatagaaaaaattaactgtgagatcaatattatcttttgaaaataaaaagacttaatttattttaaaatttaaatgtaaaaatagttcaaattaaggaaaccaaaattagaattaaacctttatcttatatgacaacgtgcatttgtaaaaacatattgttaaacattttttagataatatatatcactgtcacaatttttttatttagactatattaaaataatgtaacctaaaagaatatgaataagtccaatagttatatgtttattaaaaaaaatagttatattcaaataaatgagtctaataaaagccattaacttgagtaataaaaaaaaaaactagaaagactaatttattggttaacgcatgctataaaatcacatcagttccttaaacaactactaatacataaataagaatcaattcaattccttaaaaattaaaaaagaatcaattcagtctcatatcagatccaagcatatctttttgcttacttgtatagttgcacttgttttcattaaatattagtggttgaaatattcatgtccattaattactttttctgagtcctccttaatataaaaggattttttcaccgaacagcaaaaatttattttatagaaaagattgctaatattaagtatatataacaattgttaaagtgttgaaatgtaaattattatttttattttattaatatattaagactatttattttattttattcactttaaaagaaaaaatactatataattataggcaacataattgaatattttaattgaaattaaattataattttgatttctttttaattttaaatttatgattttaatctcctatttttttatatgattttggtctacctaatttgagggcgagccctggcacaacggtaaagttgtgtcttggtgacttgttggtcatgggtttgaatccgaaaacagtctctttgtatatgtaagggtaaggctgcgtggtttttttttttgtttacctgatttcttttttaaaaaaaacataactttggtctcatctttaatttttatatgttttaatttttttttatttggaacaattaacataaaaacaattaattaattaaaataaaaaatacttatgaaatgttgagtatttaaccaaaaatatggattttttaaaatgggaaacaaaaaaaaatatatcagaaccactaatcagaaattaaaaggagacataaattataatttaatcttcaacttatgagtaacatatgtgtctttgttttttttataacaaatctcatttataagccatcaaagtagtgttcaaactaaaagcaacaacgataatttatgagtaatgtgtaataattcattttattaataggccgatcagttttaaaattcactcacatgcatattgtcataagtgattaaagatttaatacaaatttctattttttttttatatcaatagtttaaatcttcttgatgaaatcttctaagtgaatatctactaaatattattaatagtatcatgatatctttaacatcttctcatgtagtattctgttgggaatgtttattcatcttactatttcactaaaaaatgttgcagatttacttattgttattcaataagcatgccattactacaaaaaaaaaaagcatgtaattaaattctctaaaaaaaaagtatgtgatactgaatatttattatttaaaaattaaactcataactctttattcccaaacaaaataaattactaatacacttgttttatttaattaattatgttaatgtcattatttttatgtatcattaatcaattaggagttattaatttttaaaaattatcaaaatttataaattaaaaaataatttttgattaataatacataaaaataattaatgatttattattttttcctataaatatatccattttaataggaacaaggatagtatttcaatgattaaaaaaaaaagcatttcaaatatcttctcattttataagtaattataaaataatttcagaaacaactacactctaatttagagacacaccttctaagaggttttttttttttttttttttgaattggagtattctttttttttaatatgcgaaagaatcataatttttttaatagtaattttttcatatatgaattttcaattatgacaattagattaaattaaaggacttaattactaataaatattaattcaaatatttaattaaaaatcataaatctaattaaaaattatcaaaataatttaaagacattaatttaacttaattaatatgagttcttacttatgttagtaaaaaaaaaaaaaaaaaagaaaactctaaaaaatgactaaaatgcgtacacaaccaaatcactcattcaaatttgacacggtgtaattggaatgatccgacaaagtgtgtggtactgtgattgaaccatttttgtaatgcatttcacaaactcacttaaccaacaccctcttgagactctacgccaaatttggccactttcgtcatgcccatctcctgttcgaccaaatgcctcaatttcctcgcatctccgaactgggtcacttccaaaagcctttgagatgtttaatcacatgcgtgcattgaatgagagacccaatgagtacaccttctctgttcttcttcgaccttgtgccactccttcattgtggaatgtgggtttgcagattcatggcctactggttcggtctggacttgagaggaacaagtttgctgggagctctattgtgtatatgtactttaacagtggtagtaatattggggatgtgtgtcgtgcctttcatgacttgttggagagagaccttgttgcatggaatgttatgatttttgggtttgcttgtgttggtgactttagcatggttcataggttgttttctgaaatgtggggagtggaaggcttgaaacctgatgattgtacctttgttagcttactcaactgttgttcttcattgaaagagttaaagcaaattcatgggcttgcatctaagtttggtgctgaagttgatgttgtggtgggcaatgctctggttgacttgtatggcaaaagtggggatgtcagttcttgcaggaaagtctttgactccttggaggagaaggataattttgtttggagttcaggctattccatgaacaataaaggggaggaagttgtacagttcttcaaggacacgtgtagacaaagggtgagaccagatcaacacgtgttatcaagtactttcaaagtctgtgttgaattagaggacttgaatacaggagttcaagtgcatggccaaatgataaaatatggccatcaaagcgattggtttgtagcaagtgtgttgttgactctctatgccgagaacttgtggatgtggaaaagttgtttagaagaattgacgataaagatattgtaacatggaactcaatgatcttggctcatgctcggttggcgtagggatctggttcctctatgaaactattacaagaacttcatggaacaacctctttgcaaattcaaggtgcctccttggttgctgttttaaagtcttgtgagaataaatcagatttacatgcaggtaggcaaattcattcacttgtagtgaaatcgagtgtaagtcatcatacttttgttggcactgcattagtccacatgtacccttagagtgtgaaatcgagtgtaagtcatcaagcaaaagttgtctttttttttttttcttttttctttttactaatataagagtatttaacttttaagtcaattcttatgttactttcatacaatactctcccagacatttaaataagtattatgtgatatgataaactcaaataagtaattcttaataggtctttctaaatgtaattcgagtaataatcaagacaaaaggtataccattttaaccatcaaactaatttctttcaattgtgatggtagctagacaaggccacaaaaatgatggcaaaaatactcaataagagacctaattaccaaggaaatgtacgggcaattacttacgtgacattgttattttgaactcctcttgtcttccaagataacaagcaacctgcaaagagtgtacagtatgttcagaagtcaaagcaaaagcttataatttcttatttctctaataacaagaggcaattagacatgcaatttatctgttaggccttcatttggaaagattagaaatccaaaaaataaaaacaaatggctggtttttgtattgcatgataaaaaaaattggcaagtcttggtcagacaagtcacagggttttttatgcatcctagtaaatttaaagtatattatatattcataattgcattaccaaatggttgcacaagttgcagagatgtgctagccacataaacacgccaaaaccagataagcagcactccatatgttaaatacttcatggcacaataaaaaagaaaaagtatcttaattataaacctctacaaagaaagtctgttaaaagaaaaataaaagaagtatgtctgaagatacctttaagatgagaagcacttttgtatatgaagcattatcatctttatgagatgaattttggtctgcataataatttaaactatacttttaacaaacaggtgggtaagaaaaataattttaattaattaaacaaccaatagaaaataaaggacatgaaaatgaagataaaaactatattcatgaaggggaaatattgtttgaataatattcttagcacaaacaatgtataattaagaataagaatgaggttgcctgaaacagagaaacttattggcaacttgtaaaaaacttgcaacaaaaaagaaactcacactttgaaagttccctctccttggcaactgccagcctgttaagttttgctgcttgtgcaaaggttgatggcctgagaagataaagacacacacaagcataaattttgcaatcatatcttagtcatgttagttctttttcttcctcctgtccacttttaccatttgaattcctttatagttttatacctggcaaggcctttgcttctttgttctactagtctaaacattgccaaatatttcttattaattttttttgtttaaaactgaaattaactttataatgtattagtgaatactgatatgtctctttgcagatcacttcaaattttgtcattcctgatactcttttgttggcatgtagttttctgccaaaaaatgtaacacttgtcatgtggactttagacaaaattgtggacttaccctttaatttccaactatcaaccacacacacgtaacattgcaaaatgccttgaccaatgaaaactcatcaaaggataacattagctcaaaacaaaaaggggtttcaaaagaggacccccttttcttttaccagaggaattataggctaaagcattacttactgcgacattgaacttgcctccttcgaaagttgttttatttctgcacgcaacggaatttctttttcactatcggattcactctgtagaaaaatcatacgggtaaatgttaatgttacatggttttctgtttctttttttcattaatatatataggttgaaaatttcttatttgataaaataatgaatttaatttcattatcaatcctttggttagtttgtcaagagaattttagattctcagatggtagatcacatttgaatctataagctttatcgtgacaatgggtaacattcattaattttgtttccattaattaataatcagaatggacaaaaaatgacgataccttcttcttagcgtgatctagacaatagtatgcaaattgaaaaacagcaacaatgagaaatatgagaggagctgctaacgacctttcacgttcttggcttatatcgtcttccataattcactattcaatgcagagtgaattccaatgcacgtgttctgtgttagtttcttttttctaatttctgatttactttacccgggggaaaatagaaaagttggccaacttagaattaaaattgttatttaaaacgagtttaaatagatatgaattgaacattggaaatgaaaaaaatgaaattaaaacgagatactaaaaataatcagcccgataaatattaattacgagtaaaattggtgaaatattgtcagtaaggaaaaaatagatatgaatcgacaaaaaaattatacatttaagtgattataatttttaaaataattattaaaaaattaataatatttcaattcatgaaattgcattttaattagaatagacgccgaaacaggaatggctggtcccagcaaatgcttcctggtgacgggtcctccgatgagtaaaccctaatcataccaaagcaatcttgtatctctacattttgtgtttattgatggattctgatttcagtgattctgatcagggtgtggaaaaaaccactcttattatgattgtgtttgagtccctcaaactcaatccctctctcaagccttcagggcttctacactcgtaaccatctcttgttcttcttcttcctttctcacatataaaaaacattcattactacataatggttggttggttttgcaagggaagttaggcgcgccggccagagggtcggtttcgaagtggtcacactcgacgatcgcactgccccacttgcttccctcgacatttcaacgtacgttttctttagctccacaccataaacatcccaatttttactacttaggactcattatttggtaacttttatttcttggtcagaggttttcatgtaatagtaaattttgtccagtatttgttactactctacctatttgattaaatggtgtctcatttggtggcattggctttgactatagcagccctgagtctctcagatggcctaacgttggcaagtttaaagtcgatggtgtttccttcgagtcactagcactgcccgagttacaggtctgctcacgttctttaatatgtttctctatgcttttttttttctaaattgagttgtagattggaattggattattacattgccaactatatcgcgattcttgcatgttgcatgcatatcaattcatcttctaaatgtggtatgaacatgatactctacaactgttcccctacattttatagctgcagtttattttatgaatgtagatttgtcattgaggatgttgaaagtattatttgtcatagtccttgagcttttatgatactttcaatgaataggttagagaagacacctatctcttcatcattgatgaagttggtaagatggagttattcagttccccattcttccctgcagttctaagagttttggagtcaaatatcctagttttggcttccattccagttccaaagtttggcagagacataccaaaaggtgatttttttcccatagtttcgcatcgtaggaacatgttttctttacttgattctttgtataaacaagataggactaaatccttgaggattgaggattttggacaaactctcttgccgattgctttgctgaacttgtgaatgactaatgactaatgttgtcaatttctgcagtagcaaggttgcggaatcatgcatcggaaacttgttttacattgagcattagtaacagagatgctgttagagaacagatacgctcacaattggaagatctgctgacaaaacactaaacatgtttgtggtctgaactcatacctttaacttatataataaattatgatgggctaatactatttagtgagaaaaaaagtgcaaatcttaattaagtttgaataaccaaggaatgggagacggattttccaaaactaaaatattcagacatcatagtctatgctgctgtcagtgtaaaacaaagtgagttcaacataattgtgaacaaactgacgtataaaaatattaaaaagaatatatgtgcaattaaaaaataaaataatcatgacctaagtataataaattaactaataggtttttatcaacttcgtctatcctgctcagtagttacagcacttgtttggccaatgatgaaaatgattttgctggatcttgcatctctgtggcacgaaggttggtaccctgcaaagttagaagatatgtaaacaaataagttctctatttttttttcaattcttcttgttgttcattggcataggatagtgaaatttgaactgttttttgtcaagatacctgcaatttccttatgttttcatgcagtttgatttgtgcccaatttgcaacggctgattcctgtagcaccagattcatgattgattaatgtttgcactcatatttcagcataaaaaaatgaaggttcaaatatatggaatctgtctaattatacaatgatcaaaattacatcatttccatgtatcgttgtatcttttttttgttaaattagttttttaatcctttaatttatttttgaattcaatttgatcatgttgtttatttttgttcaatttttcatttaattttttaaattgattcaatttagtccttcaatctaaatggtaagaaatcatacttggtagcctttcaaactgtcaccaagtgattttgaacagctgtaaaatgtaaattttccccaaaaaattaaatgaccaaattgaatctatttaaaaattagaggatcaaattgaaccaaaaagaaatcagaggatcaaattaaaataaaaaaaattagaggatcaaattgaacctaaataataaatcagaggaaaaaataataatttaactttcttctttttttgtgaaactaagaatgtcttatgtctataggtcctataattttgatgattacataatgttaggaactggttcagaaatagcttgcgaagaacgctttctttatttcagaaacaacagaatgatacaatagtgtgatttcgaggatcacaacctccactattccaaaagacccctcactaatttccactcctagcttttatacattcccgctctgttagttgttactaactacagttagttacactaactatttacaccactttattacttatctaaaccccctatgataagtctcggcccactttgcatctctatcaatacccctcccttcaagctggaccttgtcctcaaggtcccatttagcaaaattagtcttcagctcttccaatagctcccagctgttttcatgatgaggaagtccttgccacttgatcaatagttcttgctgtccctttgcattagttctttgcttcaaaaccctttctggttttaactgcaactcccactgctcatcaagcattgctggtagtggttgaggggaattggttgccttgactgatttttttagtaaggacaatgaaaaactggatgaaccttactgtctgcaggcaattccagtttataggctacctctccaatcttctgaatgattctatagggtccataatatctgggacctaatatttcattgagtttcctggctagagatttcattttatagggttgtatcttcaagaagactcaatctcccacatcaaaactcaattccctcctatgtttatttgcatgcttcctcatatgatcctgagatttcaacaaattagctctcagatcatgcagtaaagtgtctctgtcctgacatagctgatttacctcctccaatttagaaggaatatcactacccttaatcaataaaggaggatgttgtccatatagtgcctgaaaaggggacatcttggctaagatattataattggtattgaaccaaaactcagcccaagccaattgtgcaggccattgtttaggccttgttcctgtcatacatctcagataggcttctaagcatctgtttacaacctctgtctgcccatccgtttgtggatgataggcagaactcatcttcaatgtagtgcccgccttcttgaataactccttccaaaatgtgctcataaacagcctatctctgtcagaaactatagagctaggaaatccatgcaacttcactatctcttgaatgaatatatcagctacctcctttgttgaataaggatgacataaggctaaaaaatgtgcatactttgttagcctgtccaccaccaccagaataatgtccttgccttgtgcttttggcaatcccccaataaagtccattgaaatatctgaccatcccttagtagggacaggtaatggttgcaataacccagctagggatatagtactggcccaacatctagggtacaataagtagaaattatttacttacaaaatgggtcagacccaacagataggagtgcatatagtaaggacagggggtacaatcaacagaaattatttatttacaaaatgggctaggcccaacaaacagaagtgcatatagtaaggacaggggttacaatcagcagaaattatttatttacaaaatgggtcaggcccaacaaaaataggtgtatttatgaatatgagggtgtaaacagcattatatgtactactgcaaagtggactaggcccaattgctaaggggtgtgcaattatggaaagggtagtgcaaacagtaatataaatgggtgtgcagttatgaatgtggtggtatgaacagtaatataaatgggtgtgcaattatgaatatggtggtgtgaatagtaatataaatgggtgtgcagttatgaatatggtgttgtgaatagcatcacatgtattgtgtaataccttgaattctaagcatgggatcaagcctagtgattagggataataaccatgctttgggttccaagagaagcttgagaaaagagtttagaggcagattcggccatctcgcacgatccacgtggggtgtggcgcaatccgcgtgggaggtctgaaccagagctatgcattcggccatctcacgcgattagcgtggttccagcgctaaccgcgtggatggttcgaatagtggtgttgttcgcgtggatgtggcgctgaccgcgcgggaggttcgaaaggatggcgcgatcagcgtggatatggcgctaaccgcgtggagggtacgagtcagagtagtaatttcgaactgatggcgcgatccacgtgggaacggtgcgatccgcgcgggactttcgggtcagttttataaaagctgattctgaacggaaattgagaaagaaaagagagggagagagagggagaagccattgttgaccagaggagcttcgtatcttctccatctttcatctaaacacctccgacccaactgagaaagtgttcagagcctcgagataagctagagacccagctttattctcgacgcgaggcggtaaacgacaagatcgagtttttctgagagaacctttgagagcttgaaacccaaggttgaaggaagctgtgcatggtcgatttatcttgggaaaagtgattccctggtcttccttgaccctctagaggtaagaaactcgagctctagccgttggttttgtgtattggattttgttggttttgggggtaccttgagaggtgtttttggaggtgttagagctgttattaggcttggaccctgtagagaaatgtgttcagagggttgttttgaggaagttaaagccttaagtcatcattattgatgaaatctgattttggctctgagtatgtgtgagcagaggtaaaaggctgattatttggctagtatgaaccttagagcaattgacaaagttgctcatgagatagtatagatgttgtttgtgagctgagattggtgataatgagaagcttggaattgatctggataaagcagggatatgctttatattagcctgatcagagtctataagaggctctggagccttgtgtaggttgagtaggatccttttgagggtctgagaatcacttgtgaagtgattgttcatgtgttatgtagaaaggattataagttcctttcgttctaacggcttaaaaccgtatttgataagtatgtgtttgttcttatgtaggacgtgagattgatagtcctagtggtggtgaccacaaggccgcgagagccggtattttgcctagagtaggtaagctcttagttcttgcatgtgcgtcctttactgtgttccaccatgatcctaatagggtgatggtcctgttgtgattatatgcatgtatatggaaattgtatgttgttaagattgactgctgaatggtgttctgtaacctgtgagaggacaattgatgtgtattgatatgagatgcttgacctgtgagctgcaccctgagatgggtggttgatatgtatggctatgaattgcctagcttatgacctgcatggttgattgttgaatcctatggtagtatgatagatgacatgagattgagtaagacctgatgtgagatgttcctgtgatatagacgtagcctcccgaacggagatgttcctatacctacagatgtagcctcctcaggcaattgtattgagataggttatgagatgttcctgcgatatagatgtagcctcctgattggagatgttcctatatctgcagatgtagtctcattataaagagatgttcccgttatatagatgtagcctcctaagtggagatgttcctatatatacggatatagcctctgatagatgtattgagatcctgccatgagatgttcctagtatatagatgtagcctccctgggtggagatattcctatatacatagatgtagcctctgcgggatagtgatatatgtgatgaatggctgtatgccaggagtatagcctgattattgacaggtggatgtgcattgatggtgcatgatgattgatttagtgattccctgatgttgataatgattgtttttgatatactatttccatgtatatgtatgaaagtgaaccaggggaaagaaataccttcaagggtcctgagtttacttggattttatatctcaccccttgtgtggggcttatgttttgcaggtgattcttcaggaggagcagatagatcccaaggcaagaagcctatgcagggatagttgttacttgtaaaccttaggcatagatgacttgagcatgtgactctgatattttatattttgcctttggtttggttttgttgtaccctgaagggagatatttgtacagttttgtacttaaacaaagattttatgtatattcaccttattatgatgtacagtgtttatgatagtgacctttgatgacgtcactcttagtttatacttccaaactacttaaactctgatgattatatgtgtgattgttgattagtgtttggtaatgaccctcatctttgcagggggcgttacatattgccctaaaatgggccaagcccaactgctagtaagtgtgcatttattaaaagacaggtgcaaaaggcattacgaaattcgtaatagtattggttaggcccaagcactaagatggacatacttattgaatataggggtgcaacaagtagattttgttctgttttttttttgtctgttgggctaagtccaaaaacacgaaaagggggtgaacttaagaaaaaaggggtgcaaaaaccaattttcaaattttttttagggttggaaccaggtcagggcgacccggcccaacccgtattttctatctgggcacagcagccatggaaaagctgtgaaattgcttggtaaagccacctctaagggtgacaatcacactttatcaccacccaacaccaaggccggcggcgctagggtggtcggagacgacgacaacaccattgcatggtggtggctgcagcggtggccacggtggtggctacatggtggccggaaaaagcttaaaaaaaatgaaacacatagggaagatgaacaaaaacaagccaaaacggaataaacgaaaatgaaaatagctacaaccaatcaacaacaaataaaaagaagaagctataccaaaagcatgaagagaataaaaatccaatgaaccaaaatgtagaagaaaaggaaagaagaaaaaaaacaaaggagaggaaaggggaaaaacgtaaagagaaaatgaggaggaaggaagaggtacctatggccaagtgtcaacaccggaatggtcaaggtgtgtgctctgggatccgcaccttttcagcttttctcccccattaatgcttctctctctctttttctctttgtagtgccttacgtagcttttttttttttttttgcttttccttgacctaatgggtcttatggtccattttcccttctttttgctatttgctgccctgtttttctttttgttaccttctttccctttttttttactactctttattattttatttcttttcttcttttcttttatacatattttttaaaaaaactgttatatcttttatttgttatttttttttactatttgttattattatttatatttccttttttcctttttttttccttttctttattttctctctttcttatcattcatttttttatcatcattttttaatttatccagacaaaattaaggtatgacagctgcccctctttacttatctttttattgaaaataaaagataagtaaagacaaagacactaattttgttcgggtggtcgtttgaaagatcacactaagagaacgaagaaacacgatcggtgtatcaacagatgaagaactttgagttcaacgtgacaaagcatgtaaatgaatctcgtaaaacaaaatgcaaaggacattgagtcctatcaaaagtaaaagaggagggcactgagccttatcaaaacaaaagaggagggcactgagcccgatcaaaacaaaagagaaaaagaggaggacactgagccctatcaaaagcaaaagaggagggcactgagccctatcaaagcaaaagaggagggcactgagccctatcaaaaacaaaagaggagggcactgagccctatcaaaacaaaagaggagggcactgagccctatcaaaagcaaaagaggagggcactgagccctatcaaaagcaaaagaggagggcactgagccctatcaaaacaaaagaggagggcactgagccctatcaaaagcaaaagaggagggcactgagccctatcaaaagcaaaagaggagggcactgagccctatcaaaacaaaagaggagggcactgagccctatcaaaaaacaaaagaggagggcactgagccctatcaaaacaaaagaggagggcactgagccctatcaaaagtaaaagaggagggcactaagccctatcaataaaacaaaagaggagggcactgaatcctatcaaagcaaaagatgagggcactgagccctttcaaaacaaaagaggagggcactgagccctatcaaaagcaaaagaggagggccctgagccctatcaaaacaaaagcaaaggacgttgagtcctatgaaatgtaaaagactgaggacattgagtcctttgaaatgtaaatgactgaggatattgagtcctatgaaatgtaaatgactgaggacattgagtcctatgaaatgtaaatgactgaggacattgagtcctttgaaatgtaaaaagccaacaggtagtagtactcagaggctcaaacctgtgagaaagcgagaggttgactctatgaaagggtcatttattccaaactggatcttaaagcatgagttttggaatgccatttgatgaatgaaaagaaacatgagagttttgccttgaaatgtagtgaacgtgggctttgtacccagaaatgtaatgtgactatttgtgagtcatgaaaatgagatatgtcaaacttcaacattctgggatgagatgagatttgaattgtgcactgctcataacactctttctcttttgttataccttgtttttttttcttctttccttcttcttttttttctttttttttgttttttttaaaaaaacatagattgactgtttctttctgaaagatgtgatgattcatgcgaactcatcttgactcttgttgatctcttcggagaatcccttagagtgtatgttttgtttgatctaattgcttggcaattttggaagatggcagtggaaccatttgacatttaatcaatcaactgaaatatcgattccagagtttgttccccttttttttaactttgattactctgcacaacaagaaaatatcaagctttgggattgaccgcatgaaccattgaaggatggcaatggatatttacactttggtatatgaccaagtgaaactttcttagcacaatggttacttttttttttttctgatttttcaaggaatgaatataatgagcgatgaataacaatgcgacaaaacaaataaacatggatgcatgcaaatgataacttgctgaagtattgcaaattttacacagaatgttcaatagaacataggttgaatgaactctaattttcattaaaacaaatttttcattacatcttatcagagtcaaagtacaactggaaataaaacatggacacatcaacggttctcaattatttaagtcattagcttaatcatgtgttggcagtagccaaagaggctatgaaaacctgatccatccactgccccagctttcgcaagctatctacttctagccttttgaccttgacttgataaaaccttttcttaaaagactgcgcttgattcgaccccatgtttcgggaatggaagttttgatcgtcaatacttcaacaacctatcataaagaagatatgatgaatgagcatgacgtacttatgctatgcatggcagatgcatttatgagatcaacacaggacgctcaaaagacctcatcttcttgctatcaaacgcattgggtaccatgctcatgtggtcttcaatcactttcaagaaaaaagagtgtataactctaacatgggttgtttatggacatgaccgtggtactcaacacacgtaaccaagaatacagtgtaagcttttgtggtccattgcgacttttggcaacacataggagaatgcaagacgtgaacaaatatacgtttcaatcatgcatgggtgaacatggcatgcaaatgatgacgacaaaatgtatgtcatttctgggacaagcaacatgctttatgaatatgaatgtatatgcaatgacttatgcggtgcatgaatatgacaaatgatgaatgcaaaaatgatgtccattgcgactttcgcactccattgtgacatatgtttgaatcatgcatgaatgaacatgggatgcaaatgatgacgacaaaatgtatgtaattgctgggacaagcaacatgctatatgaatatgaatagatatgcaatgacttatgcggtgcatgaatatgacaaatgatgaatgcaaagatgatatcccttgcaatggtatgaagagacgcatgatgtgaccaaggaaacgaggtggggtgagtctgctccgtgcccctaatttaggaacctagcagaaaaggtctaaaagttcactattcagtgacaacttccaagggtaacttcatataacctcactggcttctagagatatagtcctcttatgtaatgacaatgcggcgatagggactaccagtggcaatgcaccacataaaaaggaaaactctagatgaggcttcactatcatcaagcgagtcagagacctagcatgaccacagatcgacctccactccctatggctcacacagacccgggtatagggcccaatatctcaaagtgtgtgcaaaaagtgtatgtgtcgtgtgtgaacggagcagcctaagaattacccaaccccacctgcaaaacaatcagaaaactcccaagcagatacaacaagtacagcacatgttgtctaccctaggattcaatgatgtaatttatttctaaccgcaaaggtgtaacaacatagcaaaggatatatatacaagcatgagcgagacaaaaaataaaaaacgagatagaagcaaaacaatgaaaagaacggtaacggagtgaaacgataacaaacgggagcacaacgaaaagaagaaaaaggaaaaataaataacgaaaaagtcacgataaaattgcacactcgatcaaatggcttaactctctaaccagtccctagtggagtcgccatctgttgcaacctatccggccacgacagggacgacgacgaaaaagaatataagaaaagttcccaaaaatgggaaaactagagaggagtcgccaccaacgtttatttaaggaaaacattggaaaaaccaaaagataagtcatggtctacaattttagagaaaaaaaggattcgggagtcgtttacgcacagggaaggtgttagcaccccatgcatccgtcacgaagacggcagcctttaatcgagtgtgtgacaaataaagtgactttttgaattatttgtttttccttaagaacatgaatatgcttgttttatttttgtttatttagaaaataaaatcaatcttttattttttagaaaaaagaagattttatatatttttttgttttttaggtcgacaaggggtttgcccttgctcctacgtatccccaggtgcaatgaggaaatcaaacttacatagttcttttgttgaaaacttgattggattgattttatcttttttgaaagatttattttaattgcgttgaaaagagtcgttaaggcgtttgaccttgaaatgagcttgagtttgaagaaaaaagcaaggaaatcgctcaaggcattggaccttgaagcaatttcgagtaatatgtagattttcttgagaaagaggagatttgagtggtctttcatttgagtatttttagctttttaagaaaatattttgaatttgtggtaaacttgatgaaatcaagcaagttggagacccagcatgattttcacaaaatctatccacgtattattgaaacgttaccaagcaagtcggagacccagcatggagtgcaaaatctaaccacatattattgaaacattaccaagcgagtcagagacccagcatggcgtgcacgaaacataccacgtgttattgaaacactaccaagcgagtctgggacccagcatggagtacatgaaacataagcgagtactaaagatacgaatgaataattgataaaatattacgtaattaaatgaatcaaacgaaaatagaaaagggatagagtagaggagggggtacgcttagtaattaggagtgcatatagtatggacaggtggtgcaatcagcagaaattatttaattcaagatgggccagacccaacagataggagtgcatatagtaaggacaggggtacaataagtagaaattatttacttacaaaatgggtcaggcccaacagataggagtgcatatagtaaggacagggggtacaatcagcataaattatttatttacaaaatgggctaggcccaacaaataggagtgcatatagtaaggacagaggttacaatcagcagaaattatttatttacaaaatgggtcaggcccaacaaatataggtgcatttatgaatatggaggtgtaaacaacattatatgtactactgcaaagtgggctaggcccaactgttgaggggtgtgcaattatggaaagggtagtgcaaacaataatataaatgggtgagcagttatgaatatggtgatgtgaatagcatcacatgtattgccccaaaatgagccaagtctaactgctggtaagtgtgcatgtattaaaagacaggtgcaaaaagcattacgaaattcgtaacagtattggttaggcccaagcactaagattgacatacttattgcatatgggggtgcaacgagtggattttgttctggtttttttttgcctgttgggctaagcccaaaaaaacgaaaaggggatgaacttaagaaaaacgagctacaaaaagcaattttcaaacattttttttagggttggaatcgggtcagggcgacctggcccaacccgtattttctatctgggcatagcagccatggaaaagctgcgaaattgcttggtaaagccacctctaagggtggcaatcacactttatcaccacccaacaccaaggccagcgacgctagggtggccggagatgacagcaacaccattgcgcgatggtggctgcggcggtggccgcggtggtggctacatggtggccgaaaaaagctttaaaaaaatgaaacacatagggaagatgaacaaaaacaagccaaaacggaataaacgaaaatgaaaatagctacaatcaatcaacaacaaataaaaagaagaagaagctattccaaaagcatgaagagaataaaaatccaatgaaccaaaatgtagaagaaaaggaaagaagaaaaaaaacaaaggagaggaaaggggaaaaaacgtaaagagaaaatgaggaggaaggaagaggtacccacgaccaagtgtcaacaccggaatggtcaagggttgtgctccaggatccgcacctcttcagcttttctcctccattaatgcttctctctctctttttctctttgtagtgccttacgtagcttttgtttcttttttttttcgcttttccttgacctaatgggtctaatggcccattttccctttttttttttatatttgctgccctgtttttctttttgttaccttctttccctttttttttactacactttattattttatttcttttcttcttttcttttatacatattattttttaaaaaaattgttatatcttttatttgttatcttttttttttactatttgttattataatttctatttccttttttttcattttctttattttctctctttcttatcattcatttttttatcatcattttttaatttacccggacaaaatagggtatgacaccccctttctgacaaagccaatggtcttccttcctgcaataacacaactcctaaacctgatcctgaagcatcagtttccaacataaaaggttttgaaaaatcaggtaccactaatataggtaattggctcatcacctccttcaacttttcaaatgaccttgaagcttttgcagtccaatgaaaagcatccttcttcaataaagcatttagtggttgtgcccactttccataatctcttacaaatcttctgtaataaccagttaagcccaaaaatcctctcagacctttagtgtctttaggcaaaggccatttgctcattgcttccaatttattaggatctgcttccaccccctttcctgaaataatatggcctaaatactccaatgattcctgaccaaaagtacacgtctttttattgacatgcaactcttgctgttgtaaaacttgcaagactgccttaagatgcatttgatgctcctccttatttctgttgtatatcaaaatgtcatcaaagaaaacaagtacaaactgcctcaaaaatggtctgagcacttcattcattaaagcctgaaaagttgatggggcatttgttaatccaaatggcatgaccaaaaactaataatgaccttcatgaattttgaaagttgttttatgaatatcttcctctttcattctaatttgatggtagcctgccctcaagtccagcttagaaaaccaccttgcccctccaatttcatctaacagctcctcaatcacaggaatgggaaatctgtcagccattgtaattttatttaacagcctataatccacacaaaatctccaacttccatcctttttcttaactaaaattactgggctagcaaaagggctagtattggccctaataattccagctatcaacatctctctcaccaatctttctatctcatctttctggtcatgagaatatttataaggtctagtgttaggaattttgttaccaggctgcagatttatagcatgatccttctccctgtgaggtggtaaccccttaggttcttggaagacctcttcaaaaagccccaaaacctgttccatgtttgcaggtactatttttcccttttttccctattccactgttttaatatccacccaatacctctgataatctttttccatcccttcttgaagcagtttcagactaatagcagctttgattaactcaggctcagccttcaaaacaaacttattatcctgaaccttaactattaaggtcagtttatcaaagtttgccttcacttctcccaaaactacatcagctcctcccagatcaaacaagtaataattctggaccaccaacaacccttctagcatcatttctaaatttttacacttcccactacacttcactttatgtccatcacccacttccactgaataagttgtgtaggcaccacttccaaccctatttctcttaccaatttcaatgaaatgaaattgtgggtagctccacaatcaataagaatcaccaccttcttactgtttatctctccccatagcttcaaggatttttttgtagtaaatccttctatgctatgcaaagataactgatgcagctcttctctttcctcctcttccttttcttctggctgcatttcctcatcctcttcatcctcttcctccaaaccatcactctcagttgcttatttttacatatatgagttggatgatacttctcactgcaagtaaagcactcccccttcttcatcttttcactcacctccattggagatagcctatgaaaatttttcttcttactccccatttccccaccttgtttcaaccctcttacagactccactcctttgttactccatggctgccactctctgctgcttttcaaactagagaaattggatttttgaaaattatgatttatcttccccatcccaatcttaggtaaattatttagaaccctaattttttcttcaatttgccttgctttcaacatagtatccatcaaggacttaggttcatgaactcttacctcagtggctatttcctccctcagtcccttcaaaaagatttccttcaaaaaactctcatccaaaccccttgcagttcccacatatttttcaaattgcccaataaaattctgcacactatcttcctgttttaatgccaatagtgactgaattgggttagctacattaaccccctagaatctttgaatcactgcaagcttgaacccctcccatgactgcgaattgctcacgattcccaccattgaaaccaagaaagggcctcgccctccatggctacaagaattgaatctaacctctcttcctcctgcaccccctggagtccgaaatatttctcaattcgagaaatccaccccaccggatcatctccgacaaataccggcaactccatagacctccattgtcgtgcccttacttcctccgcatctccatatctaccttttctttcatctccgcgcaccggttcctctttttcaagccgttccagcgacgccgctatcttctgcatcagtgcctccaacgagcccaatcgggtttcaatcgcgacccgattagcaatttgcgactctcgtgctttgtccatagcacgctctagcacatcgatccttgcctccattttctttgatcccatctaccgcacaaagccccaagattggagctctgataccagtgttaggaactggttcagaaatagcttatgaagaatgctttctttatttcagaaacaagagaatgatacaacagtgtgatttcgaggatcacaacctccactattccaaagacccctcactaatttccactcctatcttttatacattcccgctctgttagttgttgctaactacagttagttacacttactgtttacaccactttattacttatctaaaccccctatgataagtctcggcccactttgcatctctatcacataactttaaagattgaaaaactcatctatataatcattaagtgtgtagtatcaaacgatctgcgtaataaccatagatagtcccaagtttcaaacgaaggtatgatagaataattgtttgaaaaattgtctctttttgtactacctcgttcaaaattaacttgagactattttgaaatttatacaacttttagcatgctagggtataaaagtgaaaggaaagaattaaatcaagtgctactttattagcagaagaataaaaagaacactggcacaaagtacaaccgattaaaacctctaatgagtaggtaataaatcgtagattaaagatacttggtgatcaatcttgattgtcaaactatgtttgcattaaaaaatacacttgacaactccaaattagaaattagcaatatggctaggcaacacctttcgcttgtaaatgagcacataaaatgccatgcttgtgaattgttatgtggtagaaaagtcaagcatgatgacaatgcatgtgatagatatattcatacattggaggaagaagaaaacccatatttcttcttaatttgatcaagcgcaccatctttttgatcctgttgcccttccttatctgatgttttttggttgtttcccttcatctctttcaatcttcctgtatattgcatgctcaatattatatagcaattaggaaaacttgtgattataatgcacctgtacattcaacatatacaattttagttgacaatttcttagttatagtaaggtagtgtcaataaaaaaaatgggaatacaaattagtatagtagaaaagtagcaggatgggagactattactctatgaatattgtttccttgaaacgaagtcttgcattttatgctcctccccacagtttatcttctatttttggttaaatatcctctacttaaattggtattcttccaaaaaaaaagtataaaacatatgctagaactatattagctcaccttacttgacagattatagcatattgaggtattaatttttcaccttttcattatggatataggccaaagcatcgatatctcattaagcattatctctgtactttacccaacagagtttgttctagcctgaccaattttttttgcgatgaaccaaatgacaaaatacaagcgatcatgacattctgacttctgtaaatcccctagagtagctcatgtttcatcccattcgtagtagtttaagtgcttatttcttaggtcaaatgatgaaacataaggaaaatcaatttgcataaaattgaactcattgtcccaacaaacctttcagagactgaaatatgccagccaatgtctccttattaagagctcccaatatgctttgttctttgcatttttctacatgaacgtccaggtcaatatcatctatatgggaggaaaagagaacacctcaagttggttacctcaaattcaaggatccgtatgttagaaaatataccatagaagcttccttaggaagcaattaatctatcactgtaatttagtcctgtttataacatatgtgctttctgattagcagagtcaaggtcaccaataaaaatagacaaaatgaattcattgacacaaatgacaaatttcatctttcttggccaaaagttttaagcaaatgtcagtaggcagtagcagtgtagcacatgtctgaggcattgttttacctatgtttaattcaagctaattttcatccattctaggcttatcaacatcatcattacatgcaaagtttgcatttgagaactttgctgagagttcccgtatactttctttaggatctttcttttccaagacgggtccatgcttttctttattgttagtaaaatctttgataacagaactgaatataccctggaatgccagaacacagtaccaaataccttcagtcataagcagagtggatatggttctataagttattaaaatgctactgtttacccttttcttttccttatggatgacagggccaggaagaagctcttcttgtgatggcatcttttccttcttgtagatgcagctcacagagtccaaaagcctaaaacaaagtcaagtataatgtacaatgagactaacattttaccagttttaaacgaaaatagtatagaagataaaaaaggctgtaaattgtaaatatctctcccattgggaaatattttcctatagccaagtagaagctttttatgtggtaaagattgatacaagattccctataccattctctaggcttttatacctgaaaatattcctctgggccaacaatgagaccacaaacatttcctggtcaccattcacctgtacaccgatgttgagttaattttatgtcataaatttatttaaaacattgtacaagtgaaagatgcagtcataccaaaacaagatctccttaggatgaacaacatgtctggctatcagaaaatgacttcaattttagaggtgaataagtgaaacctctaactgaagtctccactatcagagataactctggcaaagacctaacattgttccatacgtattgttaaatcattaaatgaaaaaaagaatgtttcatgaagttgacacgacgggacactattaagaagaaggcttcagaatacttgattcaagattcagcataaaacgtgctaaaatccataaagccaaaagcactaagtgggaataaggattggttatagcatttttcttattgaaaaaataaaccccaaaatggggattgaattgtaacaccaattgttggtaaatcttttcccatgttatatactcattaattcttcatcttaaaagcatgtaccgacttaagaaaaaatcaccaccttaattctacttttccactggtgaaaaggagtataagacgaatatcagagaggctgtaaattgttgatgcccagcaacaggaagaggaatgaaacttctttttgtaaagcacttttttaacaccctgaaacatatgagaatgagtaaccgcgagcatcagctaatattctagtcattcatgactcacgagtaaggacagaaataaagaacacattatccgtacagcatgtgcaaaagaatagacatacaaagccttctcagaacatagcagaatgtacaactgcttagctattgcatcttcaacatgaatcccttctttcaactctaagccatcttttgtaactgatcctgtgatttgttctccttgtccgtctgtataacataatataaagtctaacacttttcaatcagatccttcactggtataaaaaatagcattggaatttaaattctaaacataataagcatttagatcattgataatttaaatcaatgtatttcagaaactgactattgtttctactatgcaaactcttacccaacacctgcataaatatagctttagagggcttcttaggatgaatagttccaatgctcaatgagtttccagtttcaccatctattgctagaacagatgagtcctttgttccaactgctaaaatggttttctcaaaaccatgcaaactgcaggttttgaactgcagagagatgatatcggtggaaatttcacttgcaatatgtttccgatataacaaagatggtccatctatgttaataactgaaacctgtaacaaaatggtacattatcacacaaattagcaccaactatgcgctcaaatcaaaagggcctaaaaaatttatctgataatcactcaagcaatgatatgattagtaattatcacctataaaaatttatctaataatcattcacttgagttgtgatctatgttcacacaaattacagtaccactagtctttataagtttcatactgtggattacgtgatcagtccctttctttgtacctactgtaaaagaggaatgaaaatgcaaatcactaccaactaaagtgtgaagtctgatgcttgtttaataactaaggaactagcagtaaacaaagtaacacgctacacaataccagttagggatggcgaaatgggctgggttgacaatatcaacccacaaatcaaaagcggggcgggccagcccggcccgcaaaattgcgggccaaacccggagagaggtggactagtccgctggacctatattatttaaatattaaatattaaaattaaataaatatatttaacatattttgaaataggtatattctttaaatttatactcttttacactctcataattaacttctaagttttaatattaaaatggttatgataatgatactttcaaatagtctttcattactagcctattacacttttggacagtttataaccgtaaatttcatttgtaaatgatgtaattttgtgaattatcacatgacatcatttatttagcattaattttaaattatttacttttatttaactttgtatttttttaattatcatatttgtatttttttataatttttgttgtattttattttttaaattgacttttttattttttttaatttttgatgtgggctagcccgcattaaagcggggcgggctagcatttgtagcccactttgcaaaagcggggcaggctggcttttttggctggccgagccggcccgccccatttttttgcgggccagcccgtttgccatccctaatatcagtgcctcgtcagaaggaataacaccctcttctaacaacagtctagcatcacaccatatctggtcatccagtccatacccagaatcatctcaagggtaggcatacctagacaatacagatcgatcacatactctctgccttcatactgaaactgcacgtccctgcagcacgtgctcacctgacatctttctctagatgcagtgataacctccatcggagggcaaaactgagcttaggcaatctcagcctcaacaaccacatcctgtatgaaggaatgtgtagctctagaatcaaacagaactctaacatcgcaatcatcgattagaactgtacctctgatcaggtctggagctctggctgcctctctggcgtccactgtgtacacccgtcctgctgtgggtgccgtcatctccactggagcagcctgtgcctgtctctctgtctgagggcactctttggatatgtggcctagcttgccacatctaaaatagataatctggcccgtagaacatgctcccagatgctccttcccacaagctgaacacttcgggatagatcttccccgagctgaacacctcttgaatctgtcagagggtgcagagactctcaacatcgcgcagggatttacatcagaaaacccttttaagggtgtggcgcggatggcgccagacccactggaaagtggcgcctggagcgccagatccacgctgatggcgccaagatctctggaatgtggcgccaggggcgccagaaaggtgctggtagcgccagattctctggaggtccacgccaagagtgccagagttggtgccaggggtgtcagttttcccagccggcgctgatggcgccaggtgtggcgctgagggcgccagagtccctggaagctggcgctggaggcgcgggagctggcgctgatggcgccagaccaccgacatagtggcgcggatagcgcgggaggtggcgcggatcgcgccagagctcgggcaggggcactatttaaggccaaaaactcgaaaaataaaggggaaaagttgtgtttcttcttccccacgaaccccacctccattagagcttactccaagctttctaggaccttttagcttggttaaaacacctccctatgacctttaatccctagagaaacctttggaaagctataatccttcaattgttttcttgaaaaccccttgtgagagagaattgaattctcaaaaaaaactcagagaacttgagagtggcgaggacccacgacgtataaaggacgctcgagcttgaggaagctgtcctgaggtcttttgagtcgtcactgaggtaagatactcaagtttctccgtttaattttgatcctggggggttttatgaatagtgacccatattagctggggctagaattagcccagggtcttgtaaagaaacttgttaagagcgaggaatagatgaaggattagctttcagtttttgatttagatgactttgaactttggctctgtggcttgtatgtgtggcttgtgtaataagtcactcttggttttggagccatgtcagagccttgattatgcttgtattgagcctgagaggctagtggaatggtgccttggttaagattcagaccattctagtgattttgaaccatgaggctgttgtgagtttatgctctgttaggtgagctgcattgagtctgtgatgactcagatgctttgtatgcagccatggtgaaccttgtatggtctgagagaagcctagtaagggcttgttctgattgaaccctaggataggggaattctgctatgttttgttctgattgaatgtctattggtttgatgttgatatgagtctgcatatgccttgattaggccttgattgtgagactgttggtggcgggagccacagaccagggaaagaactacagagtgagcctttgacaggtaagttcagtgtccctggggatgaattcccatcttgtgtgccacaccacactccgggggagtggtggtcatttcatgatgcatgcattggtagttgtatcctcataatgatatatgtatgcatctgtgcttgatttgtgatgtgatatgactgtgatagatctgttggccaatagatagatatggacctcctaggagatgatggtttcctcctagcatggctggctcttggttgaggtagctcccaggggattgattcccacaggccaggggattagaagttgaggtagctccttctattctcggaggtaccatatattgtgcatccatgcgaagggttagcacccaatgggatggcacaagtgtgagttctggactcccactgatataggcgttgaggtagctccgccaggagttgaggcagctccgccatgttgtatgatatgcttatattgttatgagggccagtgggccatttgcttgtgattgcctgatgtatgtgttatggaagtgggcaagggtggaggagaagcctccatggatcctgagcttactgagatgtgttatctcaccccgtttggggatttatgatttcaggtgactcttccggacgaagagagcagtctcaggacaggaggcccgagtagagacgtttctgcttggctgatagcagcagatggagcttgtaggctcattttttattattttggttatatgttgtacccttgagcagggatggtgtgagtgtacaccagatgatgcttgtatagttctgtataccatctgtgagggctgatattcttttgtatcacacgatgtggtgtgagttctgatgtatatgtttgtacaaaactgtttctaatatgtatatgagatttctctcctaagtatagttgttgtatattgataatctgcctaagtttagttatctgtctttatgattaggttgtgagaaactggatcagcaggggtgcgccaaatgtgctatgtgtgtgaattttatgtgatttggtttattccatacataatgaatcaagaaaagcgattttgtgtttccgctgagttttataaaccatgtttttaagcgctaatcggatatcataatgataacacgtcggaggccttcggggtgttacacccttacccttcccgggtgggccggaaccactgggccttctcccctcctgtctgactgaggaagtaggctgtccgcctctctgtctctgcaggataccctccacttggcgactctgtcttaccagggtatccatatcacgtgacccactgccggccaccagcacctggatctcatccttaagtcccctcatgaacttagctgctaggatgtctgcttcaggcaaaggccgcttgaagtgtgcatacttggccagctcatgaaactgggccagatactcgtccactgtcatgctcccctggacaagactatcaaactctgcctgcttctgctcccaggcatctctagggaaatatctgtctaggaagcaggcctcaaacagctgccaggtaatcacctctccccggcctctcaacaactgaactgtggtcttccaccactcgtgggcgtcgccctgaagcatataggttgcatacagtaacctctggtgatcggggcactccatcacctcaaagatcttctctagggcctgcaaccaccttgctgcagccactggatcatagcccccggagaacactggagggtcatgcttcctgaaggaaatcaacattttccctttggctgctacatcactgtcagcctctatctgggacatctggtcccctctttggtgacttccaccagtctgcgggtgactacgctcaccatcatgagtaggaggtgtggaggatactctgtcctccctcctgaggttcttcacctcctctaatagatcctgattagccttcaccaaggcttcattaacctctcgggttgtagccatctctcgctgcatctcctcctgagtctgcctgttagtagctaactcttgctgtatggcggctagtgcagtcgctactggatcagtctgggcactggtagccccactggtgcttctaggtctcaccatggcactacacatgtacatcacacaatgagttgatcaggcccacagttaatgtaccctcatgcaatgctcatgtcaaacaaccacagacaagcaccaaatcaaattccataaataatgttcaaatcaaaaaaactgctttgataccattaaatgtaaaatccccgtaggcctccggtgttgttatcattaataatatcagataagcgctttagacatctacaaaagaactcagtggaagcacataatcgtttttcttgattcattatgtatggaataaacatatcacagagaatacacatacaattcatacatttcacacccctgctgatccagtttatcatatcaaatacataagtaggcagataatcaaataaccaacaattatactcaggaggaacatatctcatatcataatcagttatgtacatatatatatatatatatatatatacatcagagtccacaccacaccatggtgatgcaaaagaataccagcccttaccgagggtatacagaactgtacaatcacaggtgtacacacaccatcccttatcaagggtacaaaacagaacataacaaaactgagcctacaagctccctctgctgctcctcagtcaagcagccatgtcatcactagggcctcctaccctgagactgttcttctcttccagaagaataacctgaaatcataaatccccacacggggtgagatacacatctcagtaagctcagggcccttggaaaatcattcccaccctggcccactatccacaatgcacacacaaggcaatcacacaaccaaatggcccactggccctcatggcaacatatcaagcatccaaacatggcggatctcatcaacgcctaaatcacatggcagagaaccctcaatgcctagcggagaaccctcaacgcttaagtcacagggcagagaaccctcaatgcccagaacatatggcggagaaccctcaacgcccaaataatagcatagtcaatctcaagtacatacatatcgatttaagtaatgcaacaaccaaatgcatgcatcatgaatcatgaccaccactcccccggagtgtggtgtgcaaccaagcaggaattcatccccagggacactgaacttacctggcaaagtctcagtctgtggtcctgtccctgctctgtggctcccgccaccaatagtctcaatatcacgccctaatcaaggcatattcatattaaactcaatccaaacaagcatcaattttagaacaaacgtatcagaattcccctaccctagggttcaatcaagctcagccactccaggctatcatagaccttcacaaggtccctcaaggctgcataaaacatctgagtcgtcacagactcaatgcacaacacgtgcaaggtatactctctcagcagcctcataatccaattatcattagaacggattgagttccactcaaagtcccgttcaactagcctctcaggctcagaacaacacaatcaaggctctggaatggccttgaatctacaaatgatttatcataaaggccacacatacaaatcacagagccaagattccaagttatctaaatcaaaaactgaaagctaatccttcatcgtttcatcgttctaaacaacattccctacaggaccctgggctaattctagccccagttcaatatgggtctcaatatccagaaaatcccatattcaaaaacaactgaagaaactcgagtttcttacctcagtggcgaccagaaaagctacaggactgcttcctcaagctctgttgtccttgcttgacttcaatacctcgcccacactctagtttcagagggttctctgagggaatggattttgctcacaaaagagtttctaaacaaaaggacgaaggattatagctttcaaatcggttcactccagattataggtcacagggaggtgtttagactagtatataaggtcctagaaagcttggaactgctctaatggaggtccagggcgttaggaagaagaaaaagaaatttcttcttcagcaaaacacgatctgcccttaaatactcaacctgcccgaggtctggcgcgatccgcgccactatggcggtggcctggcgccaacagcgccatccccgcgctaacagcgtcaacctcccgagacctgtggcgccatccgccccaccctggctccgtccgtggggaaaaccagagagaattagttttccaaggcacttatggcgcgatccgcgctgcacttggcgctgcccgcgccaacccctcggccaattgacgctacacgcgccatagccacgctaccagcatgaacctgccgaatgcctggcgctacccgcgccatcctggcacccctggcgccacagccagtgggtctggcgccatccgcgccaaccctagcgcgacccgcgccaaccctaaaaccaggttttctgctaaagaaacctagggccaagaatgagggtccttacaagtggtaacttcacaaccacttcctgtggccgtgaaggagtggacttagactggctttgcagtaggtacctttcaatcaaattatcatcatatagatatacatggcctgatttcccaagcaaaatgaaacaattttgtctatgctttcttgaggttgatatgatctccatgtctatacagccttctgacaaatgaagccccgtcttaattgtgcgagattctgtatgctcattcaacaacactacctgcttcatataatacaaattggtagtagttatttaaatttccaaattaaacctagttcaagttcattgaaccaattcagtacaaagtaaaccatccaaaaatctcaaatttattaagttgtaaatttgcaataggtgaaattgaattcaggctttctttcctagaaaaagaaaaactatcaaagaaaaatatagatacagaaatattcaaccaagaacaagtcagcatatatcttttaatgatttaagcaaagtattcgaatacatgcaacaagtttgaaggggcataatcagaacctcccataacatatagtcgactagcctttcctttagcatacatccattttactgatcctatggaagttttgtctgatttatatcccaaattaaatttgaacataggagtgttttcactattataatcagttgctaaactatttcctgtgtttagagaagggatgctccaaatgaagagctctccattgttgtaccctacaaccaccttacttccaaaaggacacacccaacaagcagaagacaccttctttgtttcattatatattgtctgtaatattttcccaccagttctgaaaattgatctgctttctcgaatatcccataatattatttggccatttctaaagattatgagaactctgcattgaacacataagaaaacataaatttgaaatttttcacataaaaaaattgatcaagtaaaaggaaattaattatatagaaatgtggtaaaggaaggttggttttgtgcatatcacctctgactctcggctgttggttgaggcagtatgtgtgtcaccactgtatcgtcagattcttcagttgaatttcctgaataaattgataagatacttataatgacaagaagttatatcttataaggtgttgtcatttaattattgttctaatctaactgctggtttagaaaatctcaccataagaagctgaaagaggtatggtgtatttcatccataccacatgccatggttcttgatcaagcatcaaaactgcaatattgccattaaaaaatccaatatacctgccaatgcacatacatgctcataactttcgatgtttcttcaaaattttgtttcttgatagcttatttcaaagtaaactgaaaaatttacataaagagactatgttgaatgactgagaaacaagtgatttcttccttaacagtgtacacatcagacaacaatttcttgtctatgtcccaaacctaaaagtgatttcttccaatttgatttaaatacttcatgtgggacaatatatacaaaaatgagagagagaaaaaggttaaccacacattctccatactaaaattgtcacacatatctattattgaaatggtcaaatcaaataagctaacataaagtgtgtgaaaaagtgcataaagaaacaacgaaaaatgaaaaaatattcaaagaaattagttgaaacatttcacacctaaataaatcatacaaagtgttgaaatggtcaatacaacaaattaaataagccaaaataaaatgcttgaaaaagcataaaaatacaaagaaaaatatacaaatcaactagttgaaacattttgcacatgaataaaccatgcaaagtgttgaaaagagaaagataaaacataaatatccaatctgaaataaaaataaagtgaaaagtggataataaatttcaatgtcaataagataaaaaaataaatattaatgtgaaaggtttacattcaaccaaacaaatattaaagtgagcataacataataggtcacgttggtttgatattgcgttgaatgccatgatttcaaagttttgaccgttttccctcttctattcccgtgccgatggaaccaccaaaatgggttgcacttgcacgccattctccgcctccctcttcacttctctttcactttgccaccgccttccaccgccgctaccacattttgccgctgcggtccccttttgttataaacaacaaaccccttctcactcctttcgcctcccacaaacttgccttctcccaaccatcaacttgagcttcgatcacccttgcaccaccctatacagaacttcccaaaccacacttccccacaaccccttatttctcaaacaactagtttcacgaaaaagaagaagaagaaaaagaagagaaaagggaccacaacctctaacatattgaacctgatggaagctctaccctttcccatacccattgacatctacacctctctcataaaagagtgcactgtttgcgacgacccagaaaccgccattgagttggctatacacatctccaatagcggcatcaaacccccactgcccatccttaatcggatcctcatcatgttagtgtcgtgtggtttgttggaaaatgcgtgccacatgtttggcaaaatgcgggtgagggacttcaacacttgggcaaccctgtttgttgcatactatgataatgctgattacgaggaggctacgactgtttttgtcgacatgttaggccaattggtcatgttggaatttcctccatggatatggacgtgccttctcagggcttgtgcatgcactgtgaatgtccctttaggaatgcaaattcatggatggttgttgaagttgggtacttgtgatcatgtacttctcagcagctccttgatcaacttttacaggagattcatgtgcctggaagatgcgagtgttgtcttcaatggggtgtcacgacataacatgttaacttggacagctaaaatcgttaacagttgtagggattgacatttctctgaggtttttggcgacttcaaggaaatgggaatacgaggggtgaagaaggactgctttactttttctagtgttctcaaggcatgtgggatgatgctgaatcaggagcgatgtggtgaacaagttcatgttgatgctatcaaatgtgggctggtctcagatcactatgtgcagtgtagtttgattgccatgtatggaagatgtgggttgttgagagatgcaaaacgagtgtttgagatgagccgggacgagagaaaggttgattgttggaatgctatgcttatgggttacatgcagaataatttgtacattgaagctgttaagtttctgtatcagatgcaagtagctggaatgcagccccgggaatctctgcttaaaaaattaagaattgcttgtggaagtattacgtactcaatcatgaattaactatattagaagtatgctgtacattgatactgtacaaaatgttgaatagataccacccttttcttttgtaaaaaaatgcttgagagttcaaatgttttgaaatttagctcattctttttgtttccaatgtacaaatatcgtgaccatagaggttgcattaaaaggttatgcatattatccaggtgaacctataattctaattggagcacaacacaagtagtacctataaaactctgtaagttttgttttatgtatgtgtatgttaatatataaaatttatttgtttatcattaattcaccttttctctagaacagataggcacatacgcacaatcataatagacatgaaatgatgtattggttaataaacttattcatgcagcatagaaagagtgcacttgctcagatatgaaggtctggcaaaggttgggggaactcttatcgatgtttctggtgctatgttgatggttttgtatcgtggtccagatttgataggagatacagaaatagaccatgttctacaaattaaaagaagtgccagaggtcagccagagccttcttgatggttaatcagtggcttattccatggatgtggcacgtgagtacacttctaaatagtccaagtttgagctgaatatttgattccttgggccaaaattccaagagttacaaattgtgcccaatccaaatggtccaaagggctagatacacttaaccagatgaggtgtagtcattgtttattctgtaccaatctacaagtccaaaaattctcattttctagtatgttaaactagacttcctaagctttccaacaaggtatcacatgcttgatttggagttataaaactctggctataacttttttaatctagatttccaaaacttccagcgaattcatcttaggacaccgacataccttaatgtttttgttattgcaagcagtaagcaatatagattgatctgaaatattaatatgttgtagtagacatataaatatttaattccatatatcatacacttattttgaataagaattgagagagaaataaaattttcaatttgggtggtagatatggaagttttgggcagcttatgttcaaataaatttatcctattcttcttgtatcctattatcatcacacttccataattaattcaatcataaatatatattcaagatatacttttgaggatgttacatcattcatattaaaagcctattttattgacatcttgtacagttgatattagctcaaatgtgatgcatcacaaatatcgtgccattgtgcatacataataatcagtgctactttatgctattttatgtgtctatttttatcgtgccattgttcattcatattttatcccttttttaagttactaacaaatgttatagatgaagacaaatgtttgtgatgtatatgtgctgattattgttctgttttggtaatgatttttaactactgtcatgcacaacagcgttaaaagaaacccacaaatctgtaagacaaccatagaaaggccaccatttgttacctaagcaactaatatcgtcgggtagccttccagcataaagtcataaaccacaaaactgtttttacctaggggcaacaatagttgagaataagatggattttgttgttatggttcaacgatttgctctgtttagtgaagcaattgttaatagaggttaagaatgacttgcaatcatgcacggaagtacaagaggacatcaatatgtcaatgaaaattgtttttaggtaatatgctggtaggtggtcaacaggggaaggaaaactactggagtaaagcagagttttttgtttttctaaatgttaaaacttgaaatgattgaaatatcgtatgtccttacaactgttttaatagatttatcttctagtagattgttttggttgttttgtaacatgtagattttgacaaatattttccttatttgttcagggaactattgcatctgtccttaactatggactcattacatggtgcaacaagatcatagggccagccatggttgccctttacaatctgcttcaacctgcgttttctgccatcctctcccaaattttccttggaagtccaatttacttgggaaggtaaaactcctattattatttccagttgttgatgcatttctattctaacttaaagtgactacaatcgtacttaccaagaatttgttttaaaagagagagaaaaactgcaatccacccatttttgttttggaacaagttatgtagttgagcttaataaagttcctcctctttcttaagcatggcagtttgaaattaatttagaagtttcttatttatcttttttttgttttttttacatccatgcaagggcagcgtcataggcagatcttttatcattgccggtctatatatggttacttgggtattttctagagaaagacaagcaactcttggagttgctcctcatagctcttgggtctctgaaccactttttcatgaaagaagtgcacaccagagaggtcttgtttttttggtgtccgctagcgtatccccaaaggcatcatcagattaaggaaatgggttattagatgctattcaattgtaaaaattggtcttatgattctcaaatctatttcttcaataatttcaataggtaaatctgtctttgtgtttgatcatgtcaatgtatttcaggacaaactttgaatgttgtcatattatatctgcattttgaaatacaatgtgttgtatctgaatttggagagcaattttgtaatgtgagtctatatatattttatgttccttttcttcctggaattgtgatagcccttaaaattttcgttgatttaacattaaccccaaagaaaggtgaatttggtaaaacttaataacaagctgatcaatgaaaataaaataagaaacactttagcccacctcttctttattatactttaatgttaatgctgccaaaggtagtggcatgccatacgtaaaaaggaatagactcagagaacacgacaaaggcaaatagattttgataaatgcataaaacacattcaaactaaaaaaatagaaaaaaatataaaaaaaattgcagcaaaaggatatagtcacatgttgtacacgtggcaactgatcccattagtgaaagattggtgagtaattctattaggtgcaataacagaattaggaaaatgccattatggttgaggaaatgagtgaagagtatatgttattgaaaatgaaggggtaaaagatatggatgccattagtggaatattccttcattttctgttttcttccctgatgttcttctgcgattgtattttgcttattttctatactattctgacaataacaaaaggttactgttatttgtagaattatatcatactctattgtgcagtttctgattgtgtagggataacatgcaatccctaactgagttaagctaccttagatatgcaaagtaaacagataattgaattctttaacttatattggcgttaattatttttctttaaaatttaaataatcaacatttgaactctttaacttagtaaattttatggactatgctatgaatttttttatattctaattgtcaatttttaaaaaaaatggtgcttactttaatatagctttcaattgttaagttttaaagtaagataactcatgtatatacattcattaatggttattagttactacttagtaatcacatgtctttattaccattttgtaacacttgattttttaagtttccatttatatcaaaatttaattaatattaaaattatcgacattataaattatcattaaaaataatgagatagtcaaataatgtgaaatgtcattcaatgtaattaatgaaaaaaatgtcattagtttatcattaaaatactaatattaaatcagaaagtcctaacttctttttttaatttaacatttttatcactagaatacttatcaatcaaacaaatttcactatacccacgttactgtttctaaagggtgtgcaagcaagttcaagttcaagtttagtcggtgataacataactccttggacctatcggccagtgccaccagcatcccgtggatgcagaattagcaaatatgttcttctgttttttgaatttctaatctttgaagttttggtcatcaaagtcgtcgccaaattccacccaaccaacgccagcagattacgagactcagatccatttctctctcctctcattaatggcgatcaacccaaacccttccccctaaaatctcactctccgaaatgccatgctttctcctccccccaactaaccccactttctccaatccatctgggcattccccaaattgcaaaaagccatggtctttgcagaattgcatcactcgtccgttcaagccagcttctttgtgctgtccattcaagcttcatcgtgaccttcgtgaaaaatggtacatagtgtgaaatatggtacatagtgtgaatagcagacctcgtggtgtttcaatgtttagaatttagggttcaagaggattatggtagaagaaaatgtacatagtgtgaatcgcaggttgtcgtagacgtgaaaaatggtactcatcactgcaccggtgccggtaccaactcaccacctattcttcaacgaaaatgttgatttaaggaacaaaaacccacgtactttgccttctcccaaccatcaactcgagcttcgatcacccttgcgccaccccatacagaacttcccaaaccacacttccctaaaacctcttattcctcaaccaactactttcacgaagaagaaaaagaagagaaaaggggccacaacctctgacatattgcacttgatggaagctctaccctttcccgtatccattgacatctacacctctctcataaaagagtgcactgtttccggcgacccagaaaccgccattgagttggctatacacatctccaatagcggcatcaaaccctcactgcccatccttaatcggatcctcatcatgttagtgtcgtgtggtttgttggaaaatgtgtgccacatgtttggcaaaatgcgggtgagggacttcaacacttgggcaaccctgtttgttgcatactatgataatgctgattacgaggaggctacgactgtttttgtcgacatgttaggccaattggtcatgttggaatttcctccatggatatggacgtgccttctcagggcttgtgcatacactgtgaatgtccctttaggaatgcaaattcatggatggttgttgaagttgggtacttgtgatcatgtgcttctcagcagctccttgatcaacttttacaggagattcacgtgcctggaagatgcgagtgttgtcttctatggggtgtcgcgacataacatgttaacttggacagctaaaatcgttaacagttgcagggatagacatttctctgaggttttgggcgacttcaaggaaatgggaatgcgaggggtgaaaaaggactgctttactttttctagtgttctcaaggcatgtgggatgatgctgaatcaggaacgatgtggtgaacaagttcatgttgatgctatcaaacgtgggctggtctcggaccactatgtgcagtgtagtttgattgccatgtatggaagatgtgggttgttgagagatgcaaaacgggtgtttgagatgggccgggatgagagaaaggttgattgttggaatgatatgcttatgggttacatgcagaataatttgtacattgaagctattaagtttctatatcagatgcaagcagctagaatgcagccctgggaatctctacttaaagaattaagaattgcttgtggaagtattacgtactcaatcatgaattaactatattagaagtatgttgtacattgacactgtaaaaaatgttgaatagataccacccttttcttttgtaaaaaaatgcttaagagttcaaatgttctgaaatttagctcattctttttgtttccaacgtttgggaagtctgtggtgtatctatttaggaaggagtttggattgggtaatgtgaatgtgggtagtggtgggaatgttgagttgaaacatccttgtttgcaggataggtatagggaggaatactcgtgttctcgttgttcgtctagtaagaaaggtgggaatggagggttgggaggaactccattggtgcttgttggtgctcccaattggggggagtgcagtgcgctcacaaaagttgctgtgaatttgtctgaatggactgatcttggtgccaggcttgatggtggagcacagccttgcgctttgggtgataatctgcctcgcccgtatggacacttttatgtgatttctggattttacattgtgtataggtttttcaacttgccttctgaggccactcttaatgatgttttggcaaagggtaagagtttttgtgagaagaggtaggatgttgcaaagagaagtgttgctccgaagccctttattgagcagtactgcttcagggcaccctacattgcctctctattgagggagggtttgcacattaatgataaccagataactgttggctctgaaaatatcacttggacacttggtgttgccttgttggaagctggaaaggcgttttccactagatttgggcttcatgacttggcgtttttctagatgaagataaatcctcttgttcttgtgcccattttgttgctttcttttattctacttctttgagctttatcatgtattggcaattggatgccaaggtttttccggaggcaatatcttcccatttccaggcataatagtgttactggtgcttctgttcttaacttaccatctctttttcggtttcaacgatggagtccaatgaactctggtaagctatttatttacacatatgattagtactaatccaaaaacttattagatgaactgtcttgtttaaagtttttctaagacgcttagaaattggtctgtttttgttgtccttttagtttttactattaaatgtggtatagtgaccaacatccatttgtatatcttggatatcactgtgacttgtttttatcatgttctcatcaattctcaaagcttgtagttgtcacaaatgtgtatgttctcaatttttcattattatgtggatgatttgtgcatattttgtaaatcatgaccaagttgtgactcaaaatagcttgtgaattattctgtatataattcacatgagtaattattttagaactgactttgaaatccaatttacacctatgatactgcaggggatagaagactaaagatgcctctgagcccaaaaattgcaagttcacaacaaagccaatttggtctagggcatagtcttggtgacaacagtgatggcatcgagcttgtggagtcttcattgtacccatcagctaataatgtctctcatagttattcctcaaacagtttagggcagatgcagtttgacattggcaacatgggtgctttctggtccccacataaaagtcagatgcgtttgcagagtaggagatcacagtctcgagaagacctgaattcctcattggctgaagttcatctgatgaagccgttggattaggaaaaggggctattcccactgctgttgcgatgctcaaggatggaattgggtaccttagtaagatcatgttgtctaactttggttgccattttgatgttaaccctaaagggtggagattgtcgttgatcttcttgagaatgttgcctttggcttggagatgtgtactcctgcttgtcctcaattttttgtgctcattggtgctattgctggggcctctcgctctgctgcttctttgattcaggtgatgcaagttttttagtgtatgaaggatttgcaatgtctttgaagtttaaatctttttgtttagaattaagtagcttacatgatgattcgattttggtttttctggtgtgagggtgagtacaaaagttaaatgaatactaagcatattgaaattaagtatatttatgtatcataatgatatgtgtaaagtacttttatcttaatgggcttaggttacaacagtggcagacttggtggatagctcgacatggtgcatttgacatcataggaataagattgtcttcctaaatgaaagcttcaatggtcataaattgatggaggatgctttattaaaggatttgacatcctgtttcattcttggtctagcagcatcagggatggattttgtattcccggggggggggggggggggggggggtatcgccagacctttggtttcctaattcatgttgtttatcatgtattaggacaccatagttctgctacttttgttgctaggatgtatatacatcagtaccacttgtactgaatataatattatatataatatatctatacttttgccgataaaaaaaaaaagatgtgtaaagtgattgttctaacctaccctttagtgggtttttttcatctgcttgtttagtagtcaatagcgtgttatggtggagtagtcttagaccactatgggattcaaatagtggagtagttttcaattgtggccattgcggcttttcacatgctatagtggtgttaccatgatataaccttcaaaagcccatttttataccccagtaacacagttgttcataccatttagtttgtgttatataccatttaaaataacggtcatcctgcatcctactttctcactatggcatttttagagttggttgctatgttttgctatctgaggttgataactgtgattgaaagtttgaactgatttttcttcacaggcttctaccaggagctgtttctttgctggttttgctgctcaaaggaattttgcttaggtgaaaagtagatcctttcttctttattaaatatgagcattaagttaatgatgcaacacaataatcattccgttttcttagtttggaatccatctagtgctataggtggcatgattcatgagtatgcatttgacacctttgttttacttatttatgctgctttttctctgaaaataattgtaaattgtaggtaattgccaaaggggaagtcgaaggaatggcaagcaggtttattggtatagggctcggtataggattaggtaactgcataggctcctccacaccccttgttcttgcttcatttactgtcttgacctggatccacatgtactgcaatctgaagtcatatcagtccattcaactacggactttaaacccttaccgtgcaagtaatttctgttctctctctcacatccacttaaactcaatcatgtgggagttgtgctctatttttcttagggaaaattagttcactttatagtttatactgttgatgaaacattgaatattctgacatgttgtctattctgtgtagatttaagtttgttataaaatattggaagttcttgtaggttgcaattaaatagcagtcttaggattggttttgcaatctattgttgggttgggggacggggacttggaaatcttgaaatgctactagggttgatttgtttgttaaaaggtcaaacctttatatgtctcgttgattattttgacaggtttggtttttagtgaatatctactaagtggccaggcacctctggttaaagaggtcaatgatgaggagccactatttccagctatacccatattaaatgcaacttttgcaaacaaagtgagttaatcttgcttgtgttgaagttgtgaaaattaaacctttgaacaaagatcctatgttccttattcaaaatttgctacttgctaaaattagactgatttatttattttgatcagggtttggtaattttaagattctttctggcttcttctaatagtacttctcacttctcagttcaggctggggagtatcagttcgcatgtcattctctcccttgctatgatgataacttgtttggaaagttacttttgcaattgtttagggttttaatatggtcattgttcttatgatactgtcattccttcttcatttctcttgtcaacgtgggttgaatcttggaagtattaaacatattatttgctcttctcaactcattataaattcctagtatgtgttggaagtataatatcatatatgcccttctaacatcaattgattaggcttcctagaaggatgaacaagtgtcagaatggttggtattatgttttgcacaatctaatttgtatatattttggcttgtttacttttgtaataggcacaatcatttgctttatcatctaaagcaaaagatgcagctgcagaaattgaacatcgtctgcagcttggatccaagctcagtgaaattgtcaacaacaaggaagatgtgtttgccctctttgggctttataaaaatgaaggctacatcttgtcagagcacatgggaaaatactctgtaagttgacaaccgactttccttttcattgaattgttttttctcttcctgtaaagtgtggtgggggtgatgtgcttttctcatttgattcatgtttagatgtatctgtatatgctttagagggggagactttttcaaagctaattgattggaggcagaaaggtaaacaattcatttttatcttgtaacttttctttctccaaaagtaaaaatcgaaagctatagaggctgaaaaattgttgtggtttatttgtcaaatggttttccccttgaggcattagcaaatcggtacatcaagcttactttttgcccaatttgaaaggttatcttaaatgaaatatttgccattgtgttatatggatctaataatgcatcttcctgtttttcaggttgcgctcaaagaaaactgttcacagcaaggtatgcttaaggcattgttccaggtcaattacctttattggctagaaaagaacgcaggaattgaaggaagaggaaccctcaatgattccaaacctggtgggaggctgcatatatctctggattatgtggaaagggaattcaaccatgtaaaaaatgacggagaattggtaggctgggtcacagatgggcttattgcaaggccattgccaaataggatttgcctcaaactcagtgagtagctgacatggccaaagactggtggctttcattcatgaccacttgcattacatagctgcatggggaagctagttggactcaagatgtcttggagatcaagggcattggttggttctttgccattgattggtgagtagcacatcgcacgctgcgaagcatacaactcagtgaatggcaccaaaataaccacgaactagttgaattttaagccatgtggcgacatggtgtgacaaaacccccagtttgccaccctttgtcattgtcaatgaatggactcctactgaccttgaatgttgaaatggtcaagtaactgggaaatacacacagcttctacttgagagattgcactccacggataaatttagatgtgcattgatgtgttgcaaacacatcttatttttaatatagttttaagttatatttatgtcaaataattaggaaaatagaataaaattagttaagtttagtatttttattttcttaagctaattcaataccaatttggcaatttcaggctaagtagaggaaaaatcaagctaaagaaggaagaaaacaaggactggagtcccgcgcgagtagcacggtatccacgtgggtcgcgccatgtgcagggatgaagaacagttactggaagacaccacgcggatggcgtggaatccacgcagccagcgtggagggacagtatgtatggcgccatcagcgccaaatccacgccattagcgtcaagaactcgaaagataagctattttgtctctgtcaagccacgcgggtcgcgccattctcacgccgtcagcgccatactttctgcagtcccacgcgagtagcgcgagatatcacgctggtcgcgtgaagtcgatttagtttccttatttaaaaagatctgttttatatttaggcttagcttttgggtttcttaccttaattacacgattctatatatattaggcctctgaacagagtgagagaggaatacattagaatacattgagaaacattgctttagtcattgcaaaccctaggaatcaagattaaaggcaaaagttctgcacaactatgaattcttcttatgctatggtgttcttgaagcctatggctagctaataatcttattgtgggaaggccatgaacttatgagtcatcctctgtaacttgactggtattgaatgcatatgttttgatttctttattcttatcttctcttttatttcatcttgtttagaattgatcactctagataagtactgagagttataattcgcaatgggaacgttggggttgtaatttctgacttgttaagaataatacttgttcttcacctaggaatagggatgcgtgagtgcggagcctataatatgatctttgattgcttaaactgattaatttcactaaggaattaggttatgaattcagtttaaagggttaattcactaagaaattagggattagctaatataggaaagacttattctccgagtaatcataacacgaacccatatgatttattctctgtatgcttagtttgacagaatcgctaaaggtttagggttcttgatcgaattaaagggtgaaattgctagttatctaggatttacgaatataggagagatatctcatatgtaaacttcaagttaacatgaccagttaagtgaaagaggtgacgcttataagggattgtacctgaccacaattcttcatccattggtaatttctcgaatcaatttactgcacattttcttacaattgttcttttaatcacacaaccaaccaaacaattcacaacactttctacgtattttctgttttcatttcaatcatattgttaaccttactgtgaaattactccaatccctgtggagacgataactctacttacctgaactttattacttgtaaacgatcggtgcacttgccgtaatcgcgcaacatgcatctaaaaatgccaagcttttgcttgtttcacaaccaaacttgtatctcgtatatcatgcagctgacaaaaatctcgtacaaaatacattttcttccacaaatttgttgtgtctaatccattttagattgtctttgcccccacaaatgatccaaatgctttcatgccattgtctgtatattctgccaaataacaaaatttgatttgccaatttgttaaaacgtaataatacaacacacaaaaattgtaaaaactaaagatcatcacctccacaaaaggtttacaatttttcatgaccaagactaggcttacattaaatttttttcactctatacttgtctcctttaatctctcaaaaaaacgagcccatagagtttaggatggaagtgttgtggtgtggttcgaaagattcaaagacagacaagaagatttacaatacttgggtatcatatcaggttcaattaactaagatgtatccatatcatgcaaggatcattttaatttgattttcacgtgatcatttgattccacgttacatataaaaagctcgagaaacctgttcctgaaaaaagtgagttgttaattaagatgaaggagcagaatgagatagaggaactgtggagggaagtgagggatttgagtttgggaaacggcggaagagtagagagactagagtctccaccaaccccagttcagttcctgagagacttcatcacaccaaacaagccatgcataatctccaacgccattacgcactggcccgcacccttttcctgaaccaacccttcccacctctcccaatccctctccggcgccaccgtctccgtccacctcacccccatcggcgtcgccgacgccctcgcccctctctgcttcgcctccgcgcacgtgctgcgggtgcccttcccccacgcccttgacctcatctcctctttcgcggcttccaagctagtcgcttacgcacaacaacaaaatgattgttttcgcttcgagtattcgtctcttgctgatgactgtgaccctcactttggttgggccaccgaagctattggctcctaactcgaagctgtgaacctctggatcggtaaccagcattcccgaacctcgttctataaggatcactacgagaatctctacgctgttgtcactggagaaaaacacttcctgttgttgccacctactgatgttcatcgcttgtatattcgtgactaccctgctgccacttactcatattcttcggtattttcatcccatcatctttttattcaagaaaatataaattcagtgttactttcatgccatatgtttccgtcatttatatgttaaattactaacaagttctgaagttgtcaatctgttaataaattccatcttttggaactaattttgtatagattgaaactcgagcagtttcatcttagcaaagttgtctgcttttgattaaatcaatcattaggagactggtttgtttaaactgaaattttaaaggactatatcaagtataattaatatttactttgaaccaaattgtgtatttctttctttctttctttttttcttcttctttcttgttgatggggtgtgggttttgctattaaaagtgctgccttttggagttgatttcatttggatgttgtggtttgtaggatacaggagaattcgattggaacttgagaagccaacaaggtatgtgccttggtgcagtgtggatccttatccttctctggagaccatggatgatgagataaccaagtttcccctatatttcaatggccctaggccgtttgaatgtactgtgaaggctggcgaggttctctatttgtaagattcccttgttttgcatatgcatcatatgcatgtgttttaatgctatgctttatttcttctattgggtattctttatcatctgagatagtaaatttgaacatgtgattaggtcatcgggcatatgatgttaattaaaattacataactatgttatattcctagttgctcatgcgttatgcttttcggttaatccgttttctctaatgcctactaaactttatgaatgcagtgattgtgatccattttactagtttaattgaataatctctcttaaagatctttggcatgcatactaatcacctttagtgaatgcttcaataatatattttctggtttcttttttgacacagttcctgcattccatgatttgcatatcattttttataataaaatcagttgcctaattaattgcttcaatttaatgtaatgagtgaattatagctgataggctaatggttcatggccacagtagtactaacattaaaattttgcatttgatgcatcaaacgtatttccatgtcctgatataattacttctagtcaatcatcagaaaagaaaaaaaaaacttctactcaaccatacaacatttattgaggcttgctatctagcaatttttgccatgcaacacgagtgaatgcatgaatttggcggtattttctgtgttaagtgtttatgcccttcatccccaacccctaaaaaaagaaaaagaaaaaaaaagaaaagaaaaaaggaacgagtaagcatcctcattgcatgagtgacctgatgtagcatgtactttcaacttaatgggaatattttggcaaccttgtttgagaactttggtttttgcttcttttgattgtatcaaattgttaacttgaaagaagtgtattctaagtgggaatgaacccagacttcaaattctctaccatcttattgttgagtatcctttatgtaggcctagtatgtggttccatcatgttaaacagggtgtggatgatggaggattaactattgcagtaaattattgtaaggaccaagccttcccttttaagttccatgtccaatattaatagaaaatttgatggtagttatactttatgcagggtatgatatgcagttcgacattaagtatgcctaattcaacttcttacaatctattcgatatcgatctgctcctagtgcaatgataaataataaattttctgaggagatagattcagattctgacgattatgaatcttgatgaattctcatttcttctctcagccagccatatttgatgaattcaagaacaccaaaagtaaagggtacttgatcaaacacttttgtttagagattaaaaggaccaagccttccctttaagtgtgctcgacttgtcatttatgaaaaagacttgctcttggacgtaaatgccataacactcaccccttccttttttggtgcagacaatatttagagcatttctaataattgaaaataaataaccagatattgtttaagagagagtagacattgttctctcctctcataatcaagttaggaaaatgttaacgtataaccccccggccccccaatatacgagtagaaggaataaaaagaaaagaatgacaagtgtaagaaataatcgttaaagaggaatgttagttttacttcaaatctttacagtattttttaaaataaaagagaaattaatgttgagataaaaacaaaagagtgacaagtgtaagaaataattatttcgatttggaagatgaacgcagaaataaaaattataaaaacaaattaaagtccgctcgttttattgaaattaaaaaatatatttaaacaaaaaagcttaaaatataatttttttaaatataaaaaaaaatccaactggattgtgatcggagaatatactctaaatttatcctcagaacgtgataaatttaattttgaaaatctatatccctaaaaattcatttggaagtaaattaataagatgaaattgatcatcagcacctagaatccaaatgtgtggtgaaaatgaagctcacagtagaacgacgaatctatgatatttttatttggaatccataataagcatccaccgaaaataaaaggggctacatttttggtcgatcgatattaattttggtttaggcagagaccacaattttatattttccttatttttccttcacaagttgagtggttctcaaaatggaacagaaatcggatcggttctctttggataaataccatggaagattgaactatatatgccaaaaaaagaaaatatttatatccacaacacctttaataaattaattggagttggtgggagaaaaaatcaataaattgtttcatttatgtgtctcgtggaaaacaaagcagggtccaatacgtggatatattgtttagagatttcactttcagcctaaaataactttcttataagccttcagaaagaaaagaagaaaaaaaaactaaaaaggtgtcttataagagtgggaaggctttggttggggaacttccctttcctgcctttcccaccttgctgatctttcggtaacgcttcgttttatacaaaacaacaaggcagtttgaattaagaattgaagttggaatttttttttgcttaaatcttttttcttttatgcaaattagtgttaaaaaaatttaatttttacaaaatatgtttgttttattttttgtctttaaagtactttaaatagcattttttcattgtttaaagcatttttatctaaaatattttaaaataagaaataaaacaaacatattttataagaattaaaatgaaaaaaaataaaattacaggcacaaaaataaaaaagtgttaaattacatgaacaaaatgtattttataagtttgcatataataattatgagtaatacattttttcctctaaatattaaactagtctaacaaatatttaaactcgagattactagttgaaacaattcatgtgaattaattgaagtttgatttgttgttaatgtaaagcattctttctattatttaattgcattaatattaatgactacgttatttaagcaagataagaattttaaaataatttgacacacttgacattttgtcaaaaaacacgcctgtgcaaacccaatcaaactaccagaaagacaaaacggggaccaaatgattagttagcatccacttagcagatcgaggtaagcctaagatggaacgtaacaaagaaagaaataaaatggaactaaaaaatatattgaaaaggcattaactaaaacattactaatacttactaagaagtaagtaagaacatcaaaagaaaggatatgtaatttagtggtttagttcaattacttaaagcgttaggcgataaagaaaggcagatcaatttattaggaaccaaaaattaaaataagaaaaagaaaagaaaattattatatagtaagaaaaagaatagaaaataggaaacaaaattttccaagaatttttccttcactaagaatttttgttttcacagacaactaatgcatgctcaatttacaatggcaatcaatctcgtctctctttctcctatccttctttccttatatctatctaataaactcctctaattaactaatcaattaaccatcttaactaacttttccttcttttatcctaatagtacgttatttttgttatttatttatttgaacatcagcataattgtgttgaagtgcatataatttttcaacaataatatttcaaataaataaataaattttagttgaagaagtgaaggaccagaagatcatgaatgagaaggacctgaagatcatgaatgagactgtcaagtgatttgatcttcctatgaggccagcggggaataccaaattctctgcactttcccttgagaacagtaagcccaacatttagatttcttgatgcttctacaattggcataccaaagtacttcaccaaatctgataaagaaatttttgctaccagatcactgggtgccctctttttcttcgctagaaaacctgcaaatcctcacctcatctgttagattaagatataaatatttatgcatatgacgttattaacaaaacattaggaagcttcacacatggggtttgagaatttatgtacaggatcacaaaacaattttttttatacataaattgtatactgctaagactgaactgctggaataaaaaggataataattgacaacattcaaaattgagagcaacatggtatacaggattggagttaataacaacaatcctttaaaaaagagggaatcgtcagaagttttaaaacctaaaaaagaagtttcatttttatgtcagtcataaagaggattcctgcatttgattagcatttgagaacttttctacattcagaaccgttgaattaagttacaacaacaatatggtcatgacagtcaaaacttggagatgttgtaacagataggtttcaccaaaagattgaatatgtccatacagtagcaaagctgcagaacaaacttgctaaataggtttagtctgttagataactgagagcattgactctgaacctggtgagctttcaacatctgtctcattgtccagtgactcagactcgtcgtcttcataaggaagaaaattgagatcctgatcaagaacggggaagacttttttcgtgatggttggaaattgttgctgtgtccttgcctttcttctcctgtagagtcttgggctatatctctgtcttcctccttccggtccaacttgtatatcatgtggagatcatcaagcaagtctggaatcatcttaagctttgggtttctgaaaattaaaaaagaataataagagggtgtgagatatatgataagttactttgtagaagtaatcggaaacaaaatggagaagctcagaagatttaaaactatagaagtgatggaacagtcttgtagggagatattttttagtcaaacagtagtaaaggttttatgaaacagtgaaatagtgatatcaagacaaggctattaagaatataggcatgtcatatcaaacatagtgatgttcaaatacataattatgcaatttggagataatgtcattcctgccaaaagaaagtaggactggaaattcaatgaaatccagaactacccacaagctttcactccactatggacaggaagaaagtgaaagaaatgaggtttaaaaccctgtaagggcaaacataatgtactggataaaatataaatatttgaaaactcatagaagaaaaataggggatgagttttagggaattttagggagaaagagagaaggtaggggaagttaaaataagaagttatattctttcgacccctttccagaaactaaaggtactaaggtaggtatgccttccccttaaatggatattaataagaaaattatgcagaataccttctgtttgttgaagaaacatttagtgcatatattaatgtcacgttgttcccctttaatttggaggggggagggggatgggggggggggatcaactttttatgagaggaatggagattggagaaaaattggtctactctattctgttccttttttaaaaaatttaaatataatgcaaagcatatattcaagtatttcagcttcatacataaagaatcaactttattcttgattcccttttctcctcaaagtgtaaacaaggtactggtagtatcaattattcctttatgtcttggttagtcatataaatacaagactattacaagaaagataaatctgaatgccatattagtaaatggttaagtgaacaaattacattgtttctgcacaggaagacaacaaaatgttactgattgaggggataaaattctacatgaatatctctgaatacatctcccaatttttgggtgttttggggaaggggcatgcctagttttcaccttaagaaacatctgatatatttttttcagtaaaagcaaacatcagttgcttcaaccattgatgctatcacttactaacctttgcttatatcccaggactaacgggaagaccaaaaacatattctggtcagacggcttagctttgttctgtttgttatgaatcttactagtaaaatagcactaatgctattcccacttaaaatttccactacactttttttctatatctctctctctactacatcactggttaagtctcacttttctcacttgttttcttacatcactctttgccgtgagaataatattactcttaaaatagggataaaaagttatagagggatatattttctaaatttaatttaatatcattccatggtcactccacttccttctatttcaacttttctgtacaaagaactcataaccaaaagtatgatctggagactggagtaataagtgactaatcgccacatacataagattttttgggacaccactaaagtcctctacttcaataaacatgacttataaatgaattgtgatctttctattagagggttatgtcatgagatggaaagaaactgtttattaattgtgcagaggtctatgtgaaggctatgtgaagtaccagaaccagtactaccattagcactagaatcagcaccagcatcacgaccaacattagtactgacaataaccccaattccagcaccagcaccagtagaatgagagcataagtgagtgagtttgtaaagagtgtgttccaaatgtttttgttcttagtatgcataaattaatatattacaactgatctgctcttacccccccaatttagggtgtagaggaatacatgaggagattcaatgagaaaccgttaaagaagagaatgacgtaaaccatcataattgttgtggaaagataattccaaataagaaatatcagagtcattccagccccctagacctataataaatacaagcagggcttagtaaatgggtaatgagaaatactagcaacacattctctaacacactctattattggttgaaatttattagaaattgcaaattttggtaggtacttctcatttaatgaccatttctattctttaataaattttaaccaatagaaagatatgtgttaagagaatcttagagagtgtattgttagcactcatcaatggataatagaggcaagaagtgatactgattttttttttttttttttgcttcatcctataatcaacagtcatttcatggatttttattttaaaaaatgtcctataatggacataacaaaagtgtagatacctgaatagctagaaaagcagtcatgcagcagcagttcactgtcaaggacataaccccaagctgaaaatggtcaaatccaaaatccagtaaaccactgattaaccatccagaaggctctggctgacctctggcacttcttttaataatttgtagaacatggtccatttctgtatctcctatcaaagctggaccatgatacaaaaccatcaacatagcaccagaaacacggataagagttcctccaacatttgccagaccttcatatctgagcaagttcactctttctatgctgcatgaataagtttattaaccaatacatcattttatgtctattatgattgtgcatatgtgcctatctgttctagagaaaaggtgaattaatgataaacaaataaattttatatattaatatacacatacataaaacaaaacttacagagttttatgggtactatttgtgttgtgctccagttagaattagaggttcacctggataatatgcataaccttttaatgcaacctctgtggtcacgatatttgtatgttggaaacaaaaagaatgagctaaatttcagaacatttgaactcaagcatttttttacaaaagaaacgggtggtatctattcaacattttttagagtgtcaatgtacagcatacttctaatatagttaattcatgattgagtacgtaatacttccacaagcaattcttaattttttaagcagagattctcggggctgcattccagctgcttgcatctgatacagaaacttaacagcttcaatgtacaaattattctgcatgtaacccataagcatagcattccaacaatcaacctttctctcgtctcggctcatctcaaacacccgttttgcatctctcaacaacccacatcttccatacatggcaatcaaactacactgcacatagtgatccgagaccagcccacgtttgatagcatcagcatgaacttgttcaccacatcgttcctgattcagcatcatcccacatgccttgagaacactagaaaaagtaaagcagtcattcttcacccctcgcattcccatttccttgaagtcgccaaaaacctcagagaaatgtctatccctgcaactgctaacgattttagctgtccaagtcaacgtgttatgtagcgacaccccatagaagacaacactcgcatcttccaggcacgtgaatctcccgtaaaagttgatcaaggagctgctgagaagcacatgatcacaagtacccaacttcaacaaccatccatgaatttgcattcctaaagggacattcacagtgcatgcacaagccctgagaaggcacgcccatatccatggaggaaattccaacatgcccaattggcctaacatgtccacaaaaacagtcatagcctccttgtaatcagcattatcatagtatgcaacaaacagggttgcccaagtgttgaagtccctcacacgcattttgtcgaacatgtggcatgcattttccaacaaaccacacgatactaacatgataaggatccgattgaggatgggcagtgggggtttgatgccgctattggagatgtgtatagccaactcaatggcggtttccgggtcgccggaaacagtgcactcttttatgagagaggtgtagatgtcaatgcgtatgggaaagggtagagcttccatcaagtgcaatatgtcagaggttgtggccccttttctcttctttttcttcttcttcttcgtgaaagtagttgtttgaggaataaggggttgtggggaagtgtggtttgggaagttctgtatggggtggcgcaagggtgatcgaagctcgagttgatggttgggagaaggcaaagtacgtgggtttttgttccttaaatcaacgttttcgttgaagaataggtgatgagtttgtacccttggcaccggtgcagtgatgagtaccatttttcacgtctacgacaacctgcgattcacactatgtacgttttcttctatcataatctcttgaaccctaaattctaaacattgaaacaccacgaggtctgcgattcacactatgtaccatatttcacactatgtaccatttttcacgaaggtcgcgatgaagcttgaatggacggcatgatgaagctggcttgaacggacggaggtcgcgaggccgagccttgaagacgagccccggtcgcgaggtgtgtgactcagtgactgtgtgggctgcgctgcggatgaaactaaggaagaagaaaacctaaaaaatgcacaaaaggaaacgacgccgttttgctttaaaaaaaaaaaaaaaggccaaattttaatgtccgcacgtgcggacattggctacccctgggtccgcccctgcttcagaaacacgagatttcaccaatccaggaattggggtagcctgcattttccacagaggagccactctctgaaaacacaaactctctctcaacttcccctttctctaccccctcggcagtacacatgcacgctcctcatcaactctgtaatccacacacccacaaaggaaataaacaaacaaataacgaaattccaccaccccacaaaaaaaaaaaaaatcacatttttcaacgaaaaacgaaatttggaatgaaaatgacaaggtaaacagaatctgggtcatgagagagatgcatggtgacatacatacccggttggagggtgttgttgaaaactagtaggttggtgagcacagtggtgttggtgtgcgaggaatccatgaaggggtcatgagaataagaatgagaaaaagaaagagatcggaagcagtagcaagaagcgtggacttaatagaaggaagagaatgaggcaaaaaccagcttttaagtgcaagtttgcattatcttccgcttttttcgttggtttctgatcagtttagaatcattcacagctaaaataaggtacttttctcttagtctttttcttttgtcacctcctcactctcctttttcttcaccttttttggttcgatgtaaatttattgtgcaatcgtttaattactccatcgatgcatttacttgtgaatcaaagtgattttcttataacaagttggagcagcttagatggaatagattatatggtgtgaacgaagctatggttatattgcttctagatttttatttttacttgattaaggagactcaccatcaaactaaacataacgtaaaaaaatgattttgtttcttgtatttattttctataatcagtgaatttcattctttttatagaacttaagatattatgatataagagaccaaattttatttaaaaattataagagactaaatttactaattattaaaattatgaggatcaaaattatcatttttagagtatataaattaacatattttgaacgaaaattgagtgactcaacatattttacgtttgttttaatgatagtattattttaaaaggaaataacattcaataaaaagaaatacaattgtttataccaaaaatcaatgtagaaaaagttgtctcgatagaaagcatcaaagtattaaaccgggttttcgcggatgcatttactaaccgcttgtttgtttcaggttttttttttttttttttttttttgtgtctgcgaatgcttctttctcgtgtcttgaaatacattttacgaaaaatatttttttctgtggtgaaacggccaattataaatgccttaaacgttagagagacgaactgctatgatgcgtttgatttttatgaaacatttcatttcctacttaaaattattattgataaaaaatcattttgattttaaaatatttaaaattttagtcttattttacagcaaataaaaagaaaaaattattaaaatttattataaaatgtatttcaaacttgtttcccaattaatttgggttgaaggtgctgttaatgttaatgttaatgttaatgtatatgtatgtatttcaaacttgtttgtataaataaatattctaataaagaaaatgaaagaataaaatgtatttcaaacgtgattgcatgaataaatgttatgataaaaaatgaaaaatttaaacttatttaaaaatactatgaaaaaaatagtaaacaatcattgttatttgaaattcttttaaataatctaaaaaaattagtagtgtgcagaacttatttgtaaatattagcaagagaagtttatttcatattaataaataaacaacaccgtatattgttaaaaagagtgggaaacacatcataatagatggttcaaatatatatcatgcttttaatgagactcaattaggagatctcgaagtgaaaattatatttgattcttatgatttagtaataaaactaaaatacatttattactatatatacctaagtgatactgcaaagaggaataaaaaagtttataagatgaagaaaaatattgcataatagaagaagaaagaaaaaaacatataaaggcaagtgaaggcaaggaatggactatgtacttaaacttttttaattcaattttttttgttacctgttaaaagatgatttgttgaactttatacccccaaagcttaagcaaggaatggattatgtacttaaacttttttaattcattttttttgttacttgttaaaagatgatttgttgaactttataaccccaagacttcttaaattttttgtccgatttgatttaaatacttcatgtgggacaatatatacaagaataacaaaaatgagagagagaaaaaggttaaccacacattctccatactaaaattgtcacgcatgtctattattgaaatggtcaaatcaaataacctaacataaagtgtgtgaaaagtgcataaaaaacaaagaaaaatgaaaaaatattcaaagaaattagttgaaatattttacacctaaataaatcatacatagtgttgaaaagagaaagataaatgataaagaactaatttgaaatagaaaaaaagtgaaaaaaatataacaaatttcaatgttaataagagaaaggtttacaatagatcaaactaatattgaacaatacaaaaataaaataaaaaatgacaggaaaaaataaccacacactttcaatactaaaattgtctcaacacatgtctattattgaaatagtcaatacaacaaatcaaataagccaaaataaaatgtctgaaaatgcataaaaagacaaagaaaaatatacaaatcaactagttgaaacattttacacataaataaaccatgcaaagtgttgaaaagagaaagataaaacataaatatccaatctgaaatagaaataaagtgaaaagaggataataaatttcaatgtcaataagataaaaaaaatattaaagtgaaaggtttacattcaaccaaacaagtataatttaaattttaagcaaaatagataaaaaaaaaattttaaaaataatacatagacataaacctttgttattagaaagaggaacaatttgaaacaaaaggttacttctttctcttttgagagaaagattccaatgtaggaataagaaaagaatttgagaataaaaaatattggaatcaatccaaagatgtcatattaatttcagactatacaattttttttaagagagtttacaattatacaatacaaatgtgcaattactaaaattttttcttttaattgaatgtgcagttattttaaaaaataatttttttataattataatttaatacggagtttgaaagactcgtaaatatatttcaaaattaatgtttttataaaaatatatattttattattttaaattattattattgtttttatttcaactttccaaattgtgtttggacttattgtaaaagaaaactctcttggaacctagatattttattttgttctaaaatgttttgaatcacatgtctaaaaaatgatataaatttaattgatttttatacattattttatattttatacattattgattgaattgatattgaattaaaatattataatatgttttacgttattaatagtgcattaatatattgattgattcaatatatcaataagatatattatttgaataagacagataattaatatattagacttatatatgtgtgattttttttacaaattttttagggatataaaaacttaattatatgatttaatatatagtgtattctataaaaaaacaaatagtgtattaaatgtattttattgataaaaattaataatttttattgttaatcataactgctaattaatgtatcattaatgtgcataattaatttctttattaattttaaatcaatcccctttaaaatatttgtgcatgttagatttttttttatactgaaagatgtcagtaataatgtatcatatgatttgaaatatgttagttgtttataagttattttaaattataaattagttactttaaaatatataaatttaattataaattatactaaatttaattacacgttttatagaattatttataaatatattacaagtttatatatatttatatacacattattgatatagatagatagattaatttataaaagcaaaaattattattatttttttaaattgatactacattaattcttattttattagtttctctatttctatttaataaatatatataaaagataataattataataataataaagcattatatttaaaaattaataatttttattaattttaaatcatatcaatggttggattgaaattaaaattttaatttgacagttcaaaaatattaaaataaaagttacgtatttgaataagatataagtttaagaaacaaagaaataaaggagattacaggcggttgaaagacatcctcagtcgttattgtgtagggacaatttattttctttttatgtcaattgtttttataattttttttttaaaataatcaatgcgtttagagaatatatattctgaaagtgcgtttagaatatagatgatatttgctaaacatttttttatattaaaaataagttgtttccgtatatctgatttgaagtttataattatttttcaatagcttttttcctcctaagaagaagtgttatgcctatgatatccgatatttcccaacagtttcatacttttcttcccccgtaatttactatctaaaggatgatattttttttttgtatgttgtttccaaatgaaattgaatcttaaaatcatttttcagtaaatttattgaaacaaaaattaattatgattataattaattataacaataattaattatacatataattgattattgatataatatgatttttgtagttgttagcaattaaagttaaaaagaaacaataacattttttgtttagatgtaagaaaacacaaaatgcaaaataaattgatttgattcaaacgaggaaaagtgttgatatcaagtttcattttatttcttttagaattcttgacatgagtgttattaattcaatttggtttcgatttggtttgactttattaactctttttttatattgtatatatttttaacattttatatatacagctcaaaaagaaattggaccaacccaactcaaattaatttcacactttattttatttttttcaaaaatcaatttcacactatattgagtacactcgggcatagccaaaaacataagtcaaatcctaaggcaaggaaggagttagacatggatgcaatgactgtaatatgtacatttgttccggatatttggaatgagctgaataataaaagacccaataagacttagtcaaatgatgttgttgagccagttctaataatgagaagatggtggtaaccgttcaaggtcatgatcaccaattttctgagattttcggtaaatttcgtgggtgatatttctttcttgattctcaggttagtatcctataaatagaagcatcctccatggagaaaggtacatacacattgactctctctttttcttatacacagtgcacacaccccacgtccaattgtggtttcgtgagcattgtgatcttctttcctgaagtgtttgcattaccataaacattctcagagagagagttgatcccacattaattacccaacaatccttgttggacatttctgtttaccacgaacagaacattggcaccgtctgtggaaaacgttaaacttcgattcccacaatggttaacacgagaagtcatcagaacgaagaagcacccgcggctatggcaccacacacagttcgggtggaagacgcagtttcagacactgcatcatcgccagcaccgccaagagcgaacacgccgggtaacccactgcccacgcctgttgagatggaacaagagtcaattcagtgcttcattaacaaggcgctagaatccattctatctcggatcgaatggcttgaaaggcaacacgcccttcaacgccatgaagatatgaataacatgatcgcacaattagacgagcgttgcacaagatggagacatgatggagaacaccgtttgcagcacatggaacaacgcattgggcgtattgagaacccggcccaggggcaaccgtctttccccagatcagttggggcaagacacccgaatacccatcaacagcaagagcacggagcagaggtcaacacgccgaagcagaatattcacgtcaaactcggcgcaccctcacatcggcaaacgagactgggcgatcaagagcatcacggtataggagccgagattccttaccagatcgataacccagagcgtcacggcgcctgggttgagattccataccagactaacgaaacaggaataagcccggcaaaatcattacataattaggattaccaaatcaggatggggaccgaggtgtacagaagaaagtatcagcgtggccaacataataatagcccatttgtggacgaaatcgtgaacgcccagtttatagaagattttgacggatttttcttgtccaaatatgacggaagttaggacccacaagtgcatattgacgagttcgacatgtagatgtgcgtccgagggattggtgagccaatcatttctcggatcttcgttaccactttgaccggagcggcgcagacatggttccacacactcccgcctctgtccatttgcaattttgaggatttcggccaaaaatttctgctcaatttcgcaacaagcaaaagcagcccaaatccaagttcgcattggggaagattcgtcaacaacctggggagacattgcaaaactatctggatcggttcaaggaggctgcactacaagtacaaggtttggaagaaaaggtacacgtacatttgctgtcagccggactcagtggatcctcccgactggccaaatccatttacaaagacccagtcaagactttgttggaatttagggtccgatcaaagaaatacttggagttggagcagatgaagatcgccaatacaatgcccaaaaggaaacactctcctccgcggcaccgccaacatcccggaagtatacatcctggcagaaataacgacaccacgccccgacgatttgataccaagtacgataagtataccccattcaatacttctcgggcccagtatggagagaagtagcgcttactgagatgaagaaagtcgatcattctcgacccatgttcaagaaagctggcctcgactattctcgtttttgcgaatttcacaacggaccgggtcacacgaccgatcagtgctgggacctgagagacgccattgaaaagttcattcgagaaggtaagctgcgacgatacgtcatcaaaatgcaagggcaacgaggcaagcggaaaaccgatcagacagacgaccagaaagactgggatgaaaagaaaggcaaacatggtgatgacgagttctcggagccggaattcgagtgcaatgtgatttcgggggcaatgggaggaggaggagatacaaccaaccagcgccggaaatatctcagagaggtcttgaccgtaagggaacaaaccaaattcaaggaacgaagtgacggacccgaactccccatactctttttcactaaagaagatatgaaggatgtgatccccggtcacgaggatggcttggtgattaccgagactatagccaactatcgagtcaagcacatatttgtagataatggtagctcagccgacatcatatcctggactgctttcaaaaggatgaatttggacgaagtagatttgaaaccgtgtaggacgatgttgacaggttttaatggagaaaacaccgcactcaaaggctccatcgaattacgattgacgttgggaacaaaggacgccttcaggtcggaaagggtgaaatttgtggttgcctaattccctttactgtacaacgttatcctcgggagacctacgatccacaaatgggatatattgatgtctatcaaacaccaaaagttaaagatgataggcagcaacgacagagtagttgactgtttgtggagataaaaaagaatctcgtcagtgttacttcaatatggtaagaggacaagaggtcggtccacccaaccaagtgcaaacagcccacgagaaacaacagggcaagcccatcaacttggtggagctcgacgtcagagatgaggtcgaagagtggaggccggaactagtggatgagcttggagaagtgcagatcgggtctcaagcttctcaaatcacaaagatagggagaattaccgacctggtcgcctaaacggaattggtagaatgtctccggcgaaaccgggatatttttgcgtggacggcttcggaaatcccggggataagcccaactttctgttctcacaagttatcaatgtaccccggttcgaaactagtggaacagaaaaagcggaacctcgccccagaacgaaagcaagccttggataagcatatccgagaactgctagaggccggtttcatacgagaaattcagtacaccacgtggctgtccaatgtcgtcatggtcaaaaagtctaatggaaaatggagggtctgcgtcgattatacagatgtcaacaaagtatgccccaaggattcctacctgatgccaagcattgatcagctagtcgatagctcttccgggtttaaaactttgtcgttcatggacgcctattccgagtataatcagattcccatgaacccagaagactgagataaaacaacattaagggggggggggggggcgaggccaattactactataatgtgatgccctttggcttgaaaaatgtcggcgccacttatcagcgcatgatgaataaggtctttgcaaaacagctcgatcagaacatcgaagtctatatcgacgatatgatcgtgaagatggactcgagtgggaatcatatcacagacttagaagaaactttccgcagactgagaaatcacaacatctggctaaatcccctcaaatgcgcatttggggtaaccgcgagcaaattcctcggatttatgttgaccaacagaggaatagaagtcaacccagacaaatgtcaggtggtgttaaacatgaaactcccgacgaataagagagaagtccaacaattaaccggtcgattggcagtgttgacccgttttctcccaaagtcggcagacaaggctcttcctttcttcaagctgctgaaaaaggatgccaccatcggttggagcccagaatgtgaggccactttccaagaaatcaagaaatgtctggcctcgccaccagtattgtccaagccagaacccggagaaacgttagtcctatatttgtctgtaggagaagaggcggtaagtgttgtgctagttagagaatctggcaagactcagctttcggtatacttcgtaagccgaactcttaagaattccgagttgagataccaaaagttggagaaagtgactttcgcactactagtggccgctaaacggctccgaccgtatttccagagccataccatcctcatgcgcatcgaccaaccaatctggcaagtcttacataagccggatttggccagtcgaatgatgagttgggcaatccagctatccgagtttgacttgaggtacgaagctcggcatgcgatcaaatcccaggctttggccgatttcttggttgagctcactccgacctcggaagtaaaagaagcttggaagctatacgtcgatgggtcatccaacgcaaaggggagcgaagcagggataatcatagaaagcccccatgggatatccactgaacaatccctacgactcaatttcccaacctccaacaatcaggccgaatatgaagcaataatagctggacttatgtcctccagggaacagggagcttggaagttgaacgtattcacagactctcaacttgtggcatctcaaatcgagggaaaataccaggccaaaggacctttgctgatcaaatatttggccaaggtcaagaggtaatagtcgaattcgacgaagtggttatctcccatatccctagggaagaaaacacgagggccgacattttatccaagctgggaagcacaaaaggcacgggcaatcaaaggacggtcatccagtaggaattgttccacccaacttgtgtcttgatgatttcggcaggcacggattggaggcaacccataattaaatacctggagcagggagtgatgccagacgacgttgtggaagcaaagaaattaatccgacgcgcggccatgtataccgtccaagacgacgagttgtatcgtagaagcccatatgcccctatgttgctctgtctgggccctaaccaaaccgaatacgtgataaccgagatccatgagggcctcaacggccaacacacgagagcaaaggcattggcaatgaaagccttacgggtgaggtactattggccgacgatgaagacagatgcccaggagcacgtaagaaaatgtgaaagttgccaaaagcacgccaggatcatttggtcgtccccatccgagctgacaaccatcacatctccttggcctttttacaagtggggaatggatcttctaggaccattcaaaccagcggaagggcagtgtaagtttcttattgtagctgtcgattatttcacaaaatggatagaagtcgagccattggccaccattacctcagcccaagtacaaaagttcttcaaaaagaacatcatctccagatttgggatcccggctgatatcatcacggataacggaacccagtttactgataagcgattccgagaaatgatgaccggattccaaatcaaacatcactcctcttctgtagaacacccacaatcaaacggacaggccgaggcagctaataaggtgatcttggagggacttaagaagcgaatgcacgatgccgagaataattgggtggaacaactatactacgttctgtgggcgctccgaaccacagcacacacatccacccaagaaaccccttttcgaatgacctatggatgcgaggcgatgataccagtggagatcgaacaaccctcctggagaaggatgtctatactcagagaaggcaaagacgctaacaacagggaattgatagacgagctcgacttgattgaagaaacccgaactaaggcgcactttcgagacgtagccactaagcgactcgtcgtcgcaaaatttaacagcaaagtcaggcctcggagcttcatggaaggcaacttggtcttacgcagtgctgacatcgaaaataaaaatgcccgggacgggaaactagctaccaattgggaggggccgtacagaatatcccaaaccctcggccaaggtgcctacgtgttagagactcttgacaaaaaagcaataaagcggacgtggaatgccaacaagccgaagatgtattacaactaaaagttatgaagttccgaggacgcgaagatttattttcattcaagttttctttcaccattcatgtgtttctcgttaattgagaggaattggagccgaagttctcgcactaagtattgctcgaggcagaaaccgagtcccgaaacactattcggacaataatatacttggccattggagccaaacgaatatactatgcgcatacaaagtaagtaacaagtaatatcatagagaatcattgtacgaacgcaataagtgtacaagaatctaaatagttgaaattaacatacaatctaaactgggcatcctagccctttaagcgttgtcagcagacaccgaggtctcttcagcgccggcctcaggcatgtcctcagccgcgataacggaatcctcttcttcctcatagggggtgattatcccgtcccaaacataggactggtagtgcgccccatcaacattcaaagtgaccccaacattgagacattggacttgaaccaatgcgttcttaaaagattcccctgccacagtcgccatcatatctcgtaagtcggcaacctccttttctgagctcgccaatttgacccgcaagtcggccgcttcctgtttcgagcccaagaattttgattcattctctttagcttcagcctcggccacctccaacgccgtcttgacctcattcaggttccccgtcataaaggcagccttggccaaagcttgctcgagactgccttggacataccggagctgatgctcgagctccttggtcttcctgagtgcgtcctgcaactcctctttggccttctgtgactcgtcctgggcggtggacaactcatcttctttcttgagatatctagtcttcaaagtcactagagtatccacgagagaagcggtacagtgggtgtaaagttgtaatagttcaagctcctgcatttgctccccggagaacggggtcaagtcggagaaatgcttcggagggaggacgtagggaaagaggccctcagttcccttttcccaaagatatcctggggtcaactcagtctcgggacgtactgaccgaggatccacaattgacgggatatctgcagcaggaggagaaatgggagcaacatggtcgtcgaccgaggccgacacgttgtcgatcacgaccaccgacataggaggcgccacaggctcaaccgagactacgggtgcaggaggtgtcacctgaacagtttgagaaaatttcctcttcttgacttgagaaaggaagtgaaggttggggcctgtagcagccggtttaaccgacttaccgaccgtcttccgggatcgaggtctgatctggtcttccatggaaacagctgtaagaacaacaacagtcagtcatcacaataacaagaaagtgaaacatatcgtgagaagttttgaactaacgtggatgcgaaacattacagagaccgtgggcctctcagaaagcatcaatttgaatcactgaataagcatccgtgtccgacaaacccgtctcttcatattggtaaaaggcgggggggattcatggtgggcacaagtccaatagagaggaaatttccatttcaccccggcagacttcggcccaagttagaaaaaaggttgtttgtcgggctcgacacaagctttgaaataattggttttaaagtttttgaaagaatcggtgtaaagggagagtagcttgtggttgggacagctcctcaaagaagttcatccctttcgattagggggctctcggctggttggccagtgtggccagaaaagtagtataggagaacgggaacggtacaatggacccctaaatttacgcaacgctaaatttacgcaacgttcctcgaaggattttacgaaagcccaattgttagggtgaagttgggaaggggctaagcatagatgtttgagaagtttcatctcaaactcagataacggaaagcgaatacccaagcaggtaactacatccgcgcaaaagaagaagaagttgggctcaccctgtccggcacacgaacagatgggcttatgaatgtcggggtgacggattgagaatccttcttgattctcgattgggagtgctacaacactctccgggctcatatcggatgaggtgttcaaaacctcgtaggtaacccaagggaactgagagattaggagaggagaagggttgtcggcttgggatccagtaaaccgagattccttaactacttccgctaacggaatatccataataacctacgacaaaacaaaaagcaagtgatcagtaaagtacctggaataacgccgacacaccgggccggggtatcagctaacacaggagtagtatctcggccctactttcgagttcggggaacgatgttgatactacgggccttgtagaagtggggcggggaatgggaaccggattatgacgacatgcgtctagggtatcatcggcctatttgtcaaagccctttccagccaagtataggaatgtgtcgagacatgtgggacacggttcgaaccgagttacagggggaggccctacagaacctggatttaagggtgggggaacccttgggatgggcggaactaaaggaataccagaagggatcagagaagaacccttgagagcagtattaggggtgacatcaggtcctactatgacctttgaagggacatatttcttgggcaaaggccttttggatggatggagccccaagagggagtacgtaatacatccttggctctttcttcttccggaataggaagaccaaaaaaccagaatgcagaacgagggggaaccgttttgcgaatatgtgcctcctcctcaggggtaaaacccatctttgaagggttagattcacaaggggattgaagaaatagacaaatatggagaagaccaaacacgaacgaaatgttcgaaataaaatgcaaaggaaaaatgcgaagaaatcaagataaaatgcagtcgcagaagtgtaaaattttgaaacacaagtgcaagagaaacttaaggtacctggattgggaggaatctgggggagaaaacttgaagcaccaaaatgagtaataggagcgacagtcgctagtgggaggaggcacgaaggagaagagcacaatgagagtaaaaggtaaatgaaagaagaaaggaagaatatatattgaaaaggggaagtaaccgccagaaactgaagcgtttgaaataagtaaccatcggatataatctgtcacagaggggcagaaatgtcagaacaggtaagaagacaggggcgaattgggaataatacaaaacgactatgattaaagcgcagaaagaaaggacaaagcatgaatggatgaaagacgtgtcgtttcgtataatagagtagcagttggagcatttcacttccctaggttcttactcataaataggtcgggtacatcaaacagaaaagacaagcccagagacaggaggaatggtcaagatttatgatgatttagatttattggtcgctgaccaaaccgggatgatcatctcgaatacaatacaaccgaggtgttaatctcgacttaattgatgaaaataataagttttcgaggtactatcccggtcatccaagccaactcgataaccggactggggggcaactgtttcggatatttggaatgggatgaataataaaaggcccaataagacttagtcaaatgatgttgttgagtcagttctaataatgagaagatggtggtaaccgttcgagaaccgttcgaggccatgatcaccaattttctgagattttcggtaaatttcatgggtgatatttctttcttgattctcaggttagtatcctataaatagaagcatcctccatggagaaaggtacatacacactgactctttcttttccttatacacagtgcacacaccccacgtccaattgtggtttcgtgagcattgtgatcttctttcttgaggtgtttgcatcaccataaacattctcagagagagaaagagagttgatcccacattaattacctaacaatccttgttggatatttctgttcaccacgaacagaacaacatttattccccaaaaattttaataaagtatctcaatcaaataatctaaatttcgtataaaaaatcaaataatataaatttataaaatataatactattataatataaggtggattataattgaatgattgcgtaaatttgttccacaaccttttttttctcttatactattatgttataatttttaagtaaagaaacaaacaccttaacaataatttacacttattataattgttataaaaaaaagtgtgctagtgagtagttgactagtttaacaagtactgcttccataccatagtgctagtgagtgtgaacagtgagcataacataatcggtcacgttggtttggtattgcgttgattgcgatgatttcaaagttttgaccgttctccctcttctattccggtgccggcgaaaccaccaaaatgggttgcacttgcacgccattctccgcctccctcttcacttttctttcacttcaccaccgccgtcgccgctaccacatttcaccgccgtggtcccctttcgttataaacaacaaaccccttctcactcctttcgcctcccacgtactttgccttctcccaaccatcttctcgagcttcgatcacccttgtgccaccccatacagaacttcccaaaccacacttccccacaaccccttattcctcaaataactactttcacgaagaagaagaagaagaagaaaaagaagagaaaaaggggccataacctctgacatattgcacctaatggaagctctaccctttcccgtacccattgacatctacacctctctcataaaagagtgcactattttcggcgacccagaaaccgccattgagttggctatacacatatcgaatagcggcatcaaacccccactacccatcctcaattggatcctcatcatgttagtgtcgtgtggttcgttggaaaatgcgtgccacatgtttgacaaaatgcgtgtgagggacttcaacacttgggcaaccctgtttgttgcgtactatgataatgctgattacgaggaggctacggctgtttttgtcgacatgttaggcaaattgggcatgttggaatttcctccatggatatgggcgtgccttctcatggcttgtgtatgcactgtgaatgtccctttaggaatgcaaattcatggatggttgttgaagttgggtacttgtgatcatgtgcttctcagcagctccttgataaacttttacgggagattcacgtgcctagaagatgcgagtgttgtcttctatggggtgtcgcgacataacacgttgacttggacagctaaaatcgttagcagttgcagggataggcatttctctgaggtttttggcgacttcaaggaaatgggaatgcgaggggtgaagaaggactgctttactttttctagtgttctcaaggcatgtaggatgatgctgaatcaggaacaatgtggtgaacaagttcatgctgatgctaatggtgcagatagctttggctggtgcaacggtttgctgttattgttgatggaagcttagctttggctggtgcaaaaacaacactgcaattgttgggttggttggtacaggtttgctattattgtcggtggaagctttggctggtgcaaaaatacccttgtttgtcgggttggtttttgttttgaagtgggttgttagtagtggtacgggtttgcttttttttttgttggaggttgtagttttgcctggtgcaacagtggtggtggaagcttgatgttgctggggtcgtcaatgtcatcagagtcactgcaggtggagctgctggaggtaagcttttaagttaagttacgaattacagaatccgtatggatgatacggatcaagtaatccttaagaagcatacggattacacaatttgtatggttcttacggattagttaatccatagaactcatactgattaaccaatccgtataacttatacggattgcttgatctgtataaagcatacggattgcttaatctgtataacttatacgaattaacaaatctgtatgatatgaataaataattaaaaaattatttaaattataaaaaaattatttaaattataaagaaattgttcttaaaatttttaaaataagtaactaaaaatagatattagtcgtaattcatgggaatgcaatagttggatagtttgtcctaaaaacccatttattttgttgatttacattgaaaagttaattaaaatgatgaaatatttaataaaatatgattttaattatttaaaaataagtaggttaacattgtagattgaatttatttgatattataatgaagaatttatttgatattttttgaatttgtaataatgttggtgacaaaaaatgtatagcatttgtttgacaatatcactttgatgttgttaactattattatgatatatttgttttgtgacttattgaaatttattgtaatttgtttagatggacaatgatgactagatgtatgacaatattatgtctgaagaaattaaccaatatgaaaatattggaggtgaaggtagtgcagttgaaaataatatatgtgaagttgattgttctgcagcggttaatacttctcaggtatttatattattttgaatttggttaaagttggtaaatgcattatttatggaaccatacagatatttgtaggttttctcttcccgtgaggatgtattaaagtgggctcgaattgttgcatatgataatggttttgtagctgtcataatgaggtcggacatatcaactggaaagaggggaagaacatcatttattttaattggatgtgaaaggactggaaagtatagagcattcaaaaaagatatggtacctccagtgactagcactaaaaaatgtaattgtccgtttaagttacgagtcaaacaagtcctaggaggtgaagggtggttggtaaaattattgtgtggcactcataatcatgctttggcaaagtcattatgtggacatccatatactggtcgactaacagaggatgagaagaatattgttgctgatatgacaaggtcgatggtgaaagcaaaaaatattcttctaactttgaaggaatacaatcccaataataccacatctttgaagcaagtaataaatgcaagatatacatatcgtacgcatattagggaaggtaatgctgaattgcaacacttaatgaaactgcttgaacgcgacatgtatattcattggcatagagtgaaggatgaaaatatcatacgtgacttattttggacacatcctgatgcagtgaagttgagcaatgcatataatgttgtattcctgatagacagtacatacaaaacaaacaggtatagacttccattacttgacattgttggtgtgactcctattgggatgacattttcagttgcatttgcttatttagaagctgaacgtataaacaatgttgcttgggccttaaaacgatttagagacatttttatgaaaagtcaattattcccaaaggtcattgtcactgatagagattcagctttgatgaacgcagtaaaaactgtattccctgattcaaccaacttactgtgtcagttccatattgaccagaatgtgaaggcaaaatgtagaacatatgtccgacagagtaacgcatgggactatgtcatggaagcctgggggagtgttgtggattgtgctaatgagaatcaatttactgactgtgttatgaagtttgaagttgcatgttcgccatggccaatgtttgttgattacgtgaaagacacatggttgaatccacacaaagaaaaatttgtaacagcatggacaaaacaagtcatgcatttgggtaatacaacaacaaacaggttagaaaatcattcaatttttttaaattgtttgttgaataacctcgatttgggggattattgcttacttgaatcataaactgcagggtagagtcgacccattggaccttaaagagactattgcaaaatagccttggagatctttgtagtgtatgggatgcaatgaataacatgttgaccttgcaacatactgggataaaggcatctttggagagaagcacacatgtggtgggtcatgtgtttaaagtgacattttacaaaagacttattggcatggtctcaaggtatgtgttaaaccaaattgctgaggagtatgagcaagtccattatgcgggcaaaactcgttgtggatgtgtaatgagaacaacgtatgggttgccttgtgcatatgagctagctaaatttcaacttgggagcataccacttgacacagttgatcttttttggtggaggttaagttttgaggatcaaggttcacatgagtgcgaggtgaacataactacagagatggatgccattttttcgcgatttgaaaagcttaacttatgtggaaaagtgactttaaagacaaaacttaatgaacttgcatttcctgacaaaaattcaatgtgtccaccgcctaaaaaggtaaaaacaaaaggtgctcaaaagaaacaagtctcgcaaaacgcaagatcaacaaagcgggattcatcttactgggagtatgttgatgaattacattctatgcaaaatagttatgccacaccaaaacagtatgctttatcatcggagcatgacactcatacaaagaggaagatgcctttattgtatcaatttgatacatctatgcatgattacattctagacattattgatgttaaacttgatggtaattgtggatttcgggtaattgctgccttactaggatatagtgaagattgttggtctttggtacgcaatcatttgctcaaagaacttgcacaatggtctaatgaatacatagttttgtttggtgggttagttagatttaagcacttcaaacggtcactacttgttgatggattgttgtgatgaccttggagtctggcgcgatcagcgccagtgtggcgcgagtagcgccaggcatctgagggaatggcgcgagtagcgcaggaggctctgctagttggcatgagtagcgccagtgtggcatggttagcaccagacacactggaggtcagcgcaagtagcgtcagagcgacgtgagtagcgccataagtgcttcagaaggcctttccctgatggttttggcgccagtagcgccaggttagcacgagtagcgccacaggcattgggggttggcgcggatagcgccgtggtggcgaggttagcgccatagtctctggaacctggcgcggttagcactagaggtggcgcgacccgcacgggacctctgacggggcaggtataaaagctccatttacgcgattttggccccaaaaccttgcttcttcttcctcccagctgctctccaccattgttgaagggccaagcttccttagaccttcattcttgacccaaaacaccttccttcaaacatcaaacttgtaggaaaccacctagagagcttgaatccttcatcacttttcccaaaaaaccaccaaacggagagatcgaaatctctaggggactttgaaaaactcgagctcggcgaggaaagggagcaattcttggacacccaagctaggagaagtggtccattggtcttccttgccgtctttgaggtaagaaactcgagttttaccgtttggtttgtgattttgattttgggatgaatagtgacccttttgagctagagttgaaattagccttgggtcctttagaaaagtatgtttagaatgttgttatgatcaaggattagctttcaaatgttagtttcatgaactttggttcttggctctgagaaatgcatgtgttggtattttcttggttaattgatgattatagaccatgcatgagccttgatatttgctctatatgtgcctgagaggctatatgaacaactacattgtgtgaaagacatcgttcaaaccacattgtggattcttgattatttggcctgtatagagctttgatctctttgttttggcttgtactgagtcttgtggagactctagtgccttgattaggctgaggtagaccgttgagggtctatgagctgtctagtgattgatgggcttaaataaccttaagatagaagatgtagaggtttatatggaaaggaatgatgttcttttcattgtgactgttgagaaccatgttatatgcttaagccttgtgaggttgctttggttttgattgagcttatatgccttgtatagggcataacactgagggtgtcagtggcgtagaccaccattcagggaccgaaccacagagcacggctttatcaggtaagttcttggtttcttggggatgttttccattgctgtgttccaccatactccgagggagtgatggttgcattcatgatgcatgcattgaattggttgttgctttctcataatgatatatatgcatgcttctatgctttgtatgtatggttacctgttgattagatcttctggccagttagatagatatggacctccctaggagaagagcgcacctcctagtttggtttgctcacgtcaagggtgatgacgatcccttaagaccaagagataggtggtcccgtcgcggttgaagcctattgtcggaggtgccatatacgtgcgtccatgcgtaaggggtagctcccgatgggatagcacgggtgtgagttccggtctcacactgaggactgagagtcctgatgctgatgatgatgcatcgtggcggcgtagttccgcagatatacattagagctagatgattggctgtatattgttatgagggccgagaggccagtgtttgtgatgccttgatgacgtgttgttgattcaggtgaagccattcatcaatgaatgaagatcaagcttaagaggttttgtgatttcaacatgctcaaaggaaatgttcaaaggaaagcttgaagaaccaatttgattaactgtaaaaaggaagtatatgatctgataatccaaatgtgcacatcatgcattaatcattcatgtaggatcataagattaaatgattaagtaaaagaaattcattacaaaggcacttaagaaacaatgtttttggaaaaataaagttgcaatattaataatcaattacaaagccaatggaatcgattattctgttcttcatgtccttaagaaaacaaatcatgatcattgtaatcgattacatatcgatttaatcgattactcaagctttgtatgtaagatggaactctttgtcttaatcgattacataaattggtaatcgattacttgcctgaacatgcattcttagaaaaatacatgttgactgtcttaatcgattacttcacgaaataatcgattatattgttctttgtcaaaacccagaatgcttcaagatcattataatcgattacatattgctttaatcgattacaagatttattttgaaaaacatgtgcctctgtcttaatcgattacgtatcggaataatcgattaaatgattcgttcttgaaactcaggtcatatcttaaacattttaatcgattgctatcttgatttaatcgattacaaatgataaataattgattactggagcgtgtttaatcgattattttcaattaaaaagctgttataaaaggagcctcttagactgaggtttgtaactttgtatctgttgtaaaaatacgaattcaaaagcattcacaaacgttctgagctttcattagtgagtttctttgagttttaaacacccttagcttcacaaaattcatatgagtttttgaatcaagaaggtgaagcataattcattcaaagcataaggaaaggactgcatatgtgattgtaatctgtcattcaacctgagaatcattcattgtgcattcattcttggattatcaggtgatatctttccttgtctttgaaagtgtaattctgttcttttgaatttctgtaaagattagtctattgtaaatgagtttcttgcaagtgtagagataatgtttctctaggaacaactgagtagtgttctcagtgtgtggttttggtctctaagggtctaatagggttttagacttctgaacttcatctagggttgatgaagagaggcttgtatgattgcttgtaaggatatttttgcaatagtggaactctactctagtgttgagtagaagaactggatgtagcctcatagagtttgaggtgaaccagtataaaaatctgtggctaatctttcttcttacccattcatcttttaattgctttgtttgtgaatcaatttcattgcacagaatattatactctgttttctattgttcttagaaagggaagttgattgaatcttgattcttggttttgaaacaattttgaatgtgataaagatcctgtggtaactctgattttaaaattttaattggccaaggttcaaccaattcacccccctcttggttgttttgaagtgttcctttgtttttcacgtgtgtcatggaagtgagccaggatggaggagatgcctccaaggaccctgagcttattgagatgtgtatctcaccccgtgtggggattatgtttttgcaggagactcatctggcagagatgatggttcccaaggtagaaggccccagtagggacagctgttgcagcacctcgagagcatggaggctctttgttttgtttgttttgttgttgttttatacccctgtgagggaagatgtgcgtagacacatatgttctggattactcatgtatatggtctgtatgccctcgtgtgaggaaatgatctttgagatcagagcattgggatgcttattcttttgtatagacaccgtgagtgtcagtgatgtatatgtatatatacctttgtttacctcctgatatatctgtagagatattggttatgcatctgccatggttttaatttgttgttttggatcaatgagactggaatacagttatgatgtgtacttaacacgaaccatacataatgaatcaagaaatacggtttcgaaatcgctttcgcggttttttaattaaagtaatcatgcgcttatctgatataatatatgttaatacatcggatgcatacggggtgttacaattgtcaaaggtaaattttattttaacgttattactttgagatatcgtagatttacttatgtttgcatggtttttgtgaccaataggtaactgttgataagtggatggatattactaatttggaatacgttattgcatcaaggtataacataattctgatttcgctatctctccaacaaagtatgacttttttccctctgagaagccaaccacccagagattcaggtgttcatcgcattctatgtattggtcatgcttatggtaaccattttgttcaggtaaatgattacatcgctttacttgctagtgtaaattcgaaacacatgtcaccctacataactcttgatcattgtttcaggttgtactgagagatggaagtcctataccgccagctgctttgtcatggtcaagacactcttatgttgttgcaaaagaatggatggttccttatatgggtcgaatgcaagcatttagtaatttgaggaagtcgcgtactgaaaatgtttgtatcaagtcaaccgaaccatttgtaatttgatatcattttcttattgattaactagtaggttatggttaatgttaaccttttttttttttttacttatatttgacatgaacaatatcaattaattccaatgcttgtcttctctgtcatatttattatatagttttgttcagcctatacaagttagcataaccaatttcctggggtataaatgaagttcaacattatgttctttatataattttaactttaaaattatgtacttgtcactctattcgtgacaattaaaggtttacaacagtatcaaaaacctataaatgatagcataaccaatttcatgcgttcacatgagtgagaggtagacgcttgaatttcttccaaaaggcatccatgagtaagtaattttaaaagaatatacacgttgaggcttgagtatatttgatgcaaatttagaacctaaaatgtgaatgtaaatcattcatggtgtcggaattaagatgcaaaatgttaactcatataagttaatttacacaaaaaactagcactaaaatcatatttcgccttgtccaccaacatgtgtgtcatgcctctgtctccttcgtctaggccgcatgtatacaattgcatctttagtcacacaacgggctaattgcagcaggcgctctacttcgacgtacacatcggtgccaggagtaaccatacacatgtctatcatacgttgtaacccctctgatatcctttggcaagtaccctacaagaacacaagaacatttccaattgtctgaatgaacatggttaataagatgaatgaatttgaattgaactttatgcgttacaatagttgagtaccactacatgtcaaggctcctgatctggtaaagatggtcctgaagattgaggtggaactggtgttgggtgatcaatctgcgcatgtggtagatatggtacaaaataacggtcattcgaagggtgtctaacctcaccagtttgtgggggagtcataaatggatgagacacgcggaaaaaccactccaaatacccaaccaccgactgactagaatgagaaacctcctctgtgatagatgctagatgttgtgataactgcatccatctttcatcgatctcatctgtgcatagttcctcagtacactggtcatgtggaattacttgaacaaatccgaattgcctcagcaccctctctggtaaatgtctaacaacttgcggtccacatcggatatgccaagaaaatagaaaaattgtggcggactctatctgcacggtgatcaccgtatggagaccaacaaacatcatccatcatcaacttatctaaccgcctgcgataggtgatgacaggtaaggcctttgccaccttctaacgacacgcacgtggttgcctctcctggtagctgtcagctggggatacatttccaattgttgggaaatgttcgtaaatccaacactgcaaatgaataaacaacttaaacatattatggtcacagcctggacaaaataattgtagaggataagtatgacaagagtcaaaagcgatacctgtaacagtgtcacataatcggtaagatgtttgccgttgtgttgacatgcatagttaagattggcatacatgtgtaccaaagcagccgcaccccaagcatatcctcctgcctgctccagatcgcgaaatgcctccaagaataccacactgatatgtgtggcactcttgttggcaaagagtgtgcacccgaccaaatgaagcaagtacgccctggctgctggaatccacctcatcgactgacacttcacagcataaacttctcgcagccaagaaagccgaacatatgccccatggcattgctccgtctccgcaccagcttcttctgcagacacttcaagtaattcaacaagcaacactactgcctgtccaacatcaatgacctcgtatgacaaaaaaacccttacgattggaaggtgcaacagggcaacaacatcatccaaagttatcatcagcttccctaccggcaaatggaagctgctggtctcataatgtcatctttccacaaaagccgagagcaaccccctgtcttcggtctcaacttcatgtcggtccagagccacaggatcatcatcaacagctgcccctgcccattttcttctggcaaatgccgtaggcctacgacgtttagcttctgcctctacatctcatcccaatgctcgacgcatgtttagtgtcctaaccataatctgtggtaccatttcgttaattgtgtcacacttcaaccaatccataatgaaatttgaaaaacttaacgacatacatgtacaaacaactaaatttgcttaagtcaataaagttgcaagcaataaaaattcgaggcattgacaatatatgatgttcatgatgacttaaatgatgtgcttgtaatttaacaataaaatgtgggtcacatggtgttgccatagcgtgtcctcatccaacatcatgtttactatttgctacttactaaatgaacacacacacacacatagcatgtcaaccttgtttcatctttcaaattggtgaaagtttcctcaatcaatacatttgggacttacatttcttctttctttacattttttccacactttattatccaaacccaaattcacattggaaaacttccaaaatcgcctatatccagccactttatccccatttggtttattattttagaccgctatctatatcactattaacattcttcataaacaaataagcacatcaaccaccaaagcatgttagtatcatagcatcatatagctccataaaatttaatacatcgtgctattcatataatcctaaggtctaaaatatgtaaaataaccaataataaacaaattattttagcattaattaaatattaaagcatttttaaaaatatggcatttatatggattggtcaatccgtatggcttatacggatcctccaatccgtgcgaggtttacggattgcaggatccgtaaaccttatactgattgagtaatccgtataatccatacggattggtcaatccgtatggcttatatggatcctccaatctgtgtgatcgcctccctggtaaatggaaaacttacgactgtcactcagagcggacggaggggcaaccaacaacagcaaccacgaagaccaaaaccaccaaagcacatgaccaattgcgtcggagaattaagaagctgaaccagagtgcggagttcgaacaacaagcaaaagcaacaccactaaaaaaaaccttataaacaggggcataaatggaaatttactgttttcgaatggtgtattagatatatgttgggtgtataaagcttgtcccaaagcataattgcgtacccactagtgacgaacggctgtgattcaagtatatctttgatcaggatgtggatgttgagttgttgacacatggcttcattaattgcaaataaaaccgtcaaacagtgaaaggatagacacttccgatttgaatcaaatcatcgaaaccacgaatatatcgctctgtcccattacttaattagattctccgcgtgctttacatgtgtacctgtttcattttcctgctcttatcattaaattgtttaatatatcttcgctgaaatccttttttttttttttttacaaaatatatcttcaatgtaatatatagaatttaaataaaatattttgttagcgtacactatattattttaagtaaatacgcatctgattatcattcaaacctaagaaatttaaatttaattttaatgaaaaaaataagataaactaatcgacaaacaaatttacaatacattaatctttaaataatatgataaattaatttgcaaataattttataataaataattttttaatttttacaatttattatcaaataaaaccttaaatattacaattgtataatacaataatcttataaatttaagattacttcaaccatcacatctttttaggaaataacttatttcatcgtttaaacgatgaatatgtcggtatgtcacattttcacggcagatttacactttttttctcctgtgagatcctcacacaataaatcccgaccattcatatccatagtaaaaattaaaacaatcagatcaaacaaaagaatacaaaaaagggttaatggattagctggaccaaatgttgtcattatagtaaaaattaaaacaataagatcaaacaaaagaatacaaaaaagggttaatggattagctggaccaaatgttgtcattggatataaatacacgcgtcatcaatggccatgctatagattactttgtccaaaacttcaacctttgtcaatttctttcttgttcgactctgcttctttcaacaactttacacacacacacacacaaaaacatggcaaaggatagaacaattggtgtggctctggatttctccaagagcagcaagaatgctctgaaatgggcaattgagaacttagcggataatggtgacaccatttatgtcattcacattaactccaactctctagacgagtcccgcaacaagctatgggcagaatctggttctcgtaagtatcaatttcgtgccaattttatttatttgggtatcttttattttgggtgaactgttttttggtatatttaattgtgctttcttcttttgatctgggttgatctgatctgttttgatttttttttgtttaatgtgtttttttcttgcagctcttattcctttggtagagttcagagagcccgagattatgaaaaagtatgatgttcaaattgatattgaggttcttgatttgcttgacactgcttcaagacaaaaagaggtgattttcttttaatttgttttgcttctctctttcttactactctttctccaaaattgagttcaatttagacaacgttttattgggtgtgcctatatttttttagtattgtgtctgaaattattgttgtaattattgattttttttagatccacattgttacaaaaatatactggggggatgcaagagagaaacttttggatgctattgaagatctgaagctggattcgctggttatgggaagcaggggcctcagcacaatccaaaggtgcatactttttttgtcccttaattttttaatcttactgttatattcagcatctctcatcaataatttcatgagaattattcgcatagatattattagatttgatatttgtggattttttttaaagatgatatttggggaattaaacaatataacacctttctttttctttattttattttctaaggtgagtaggaccttgttgtaatttgatttcgctgtcacatttattgcttttcattttcttttgttatgtgtgtggcttagctgttccaatcatggagatttttgcttataacaattccatgtgatttacagtattatttctttgttgtgattatctgcatttattgaaaatgggtctcattgatatgtctgttcttttattaaaaaaaaaaaaaaacaggattatattgggaagtgtaagcaactttgtgatgacccatgcctcttgccctgtgactatcgtcaaggaaactagcagcagcaagtaaagatgatcaatttgggagagaacatttaaatttcatatattatttttcttgcattgtacccgatctagttgggccatattccctttcctaagtattattttggtgctgatgagaatttgatttatatatgatttactggactccgtagttttcactccttgactttattgaagcaataatttaatttgagtgccatataaggccatcaggcctccaaaattttattgtagtcaatgaatttatgtgatttatattaaataatcttgttgacaattaacatctcaaattagtcgtaaaatcccaagtaatttctatattctgattcttattttcttgataagtttcgaagtttgcatggctttgccattgtagaaaacaatgggtaaaagaaaaagatacataacttgaatgaaaagttagaataacaaacccgaagcgcaaattgaaaaattaatatgctgtcctttctttgaccattggaagagaataaattcacttttctgtttttgttgcaagccacgtagctttctccctggcatccactacaagtgtctttggtttaaagaagagaaataaaagaattttttttgaattaaaatagaatataagagatgcacatttcacataataaaatataaatttttgaattaaaatggaatgtaaaacatgtaaatttcacataataaaatataaattttctctatattatttctctcctcaaacacacccgtaaagaatgcatgcttttggtgtaaagttgaagatttctgaacctggaagagtcactatcatgtgagcataggttgggtggtctgagaaaaatagaaaattctggcatgaataagtgaaaaagaaaagagtgctctacaaactacttttagtgaaatgttaatcaaataggtgaactgaaagataggtgaaatgttaatcaacaagaaatgtaaatcgttaagaactgaaagataatattataggaaaacaattatgcaaaaaggaatgtagatgaacattaaaggcaactcattaatggaaaagataaggaaaaaaaaactatgggaagtgccagaaaataagttcgatgatgaaagattaaatttgaagacatacaaaacgtagaaaattaagtaatttgaactactttgttagaaatgtaaagtttaaaataaaagaagaaagaaaggcgaacttgatatggtcatgttatccttcagcacggagaagtttcacaagaattttataaatctcaattaaaaagaaaaaataacttatgtaagaaaaagaaaacaataccaagtatttatatatttaagcaaataaccatgtaaaaaattaatacgtaccaaaaatatttaagcaaataaatattgagtttctaagacaatgattcatgctccatgtgatatcatctttaataattcttgatccatgtggtgttcaaaataaaaaattttcatgtatgcaaaatgacaagctagtgttcgaaacattattctaagaaatttgttgacaacactacaattaaagatgatagataacctttatatagaagaaaggacaacgatagaaccactaagaatgataatgattagaaaaatcaatctcagaacaaacctaacggtcaaaattaaaaatttcttacatgcatgaaggcaaatagtgaaatgggtgagttgatcactagaaagggattaaataatgacacccaattaactttgatattttctatacaatgaatatttagacttttctttttgtttttttttttaagcaaaaaggagttggatcaaggaaaagtagagattgatatcccaactatgatgacaccccaattcctacaatcccaaacagacccaacatagaatatgttcttcatgatgatggggagtgattaccagccccaaggggtgccttgccattcccttgggagcaaacttcttggtttgtttttcatattcttccatttcgatttggaaagcactttctgaaaagatgattctatctcaacagggacctctcgcatattgtcaagacaaatatccaaactagttgaacatcattttggactcttgcacgcctctttttcttttgatatttgttgttcaacacctatgttctgtgtttgcaacctatattcaatttcatgagagctgtcatcacggatatccaaggtcgatccaacgataagtaaggtctaaaacaaattttaaaagatttttttttttttagataagtaagacctttttgctaacatgtgttgtttttttttatttattaatgtatagagtttttatttattttataaatattaataacaaatattttttttttggttgacttaggctttgtttgggagagggattttggaggagaagggagggaagggaaagatttaggtagagacctctccttatttgagagttttaatttttgagggaaagaatttgaggattttcaaaactcctctgaaatcctccaaagccttaaaattgttatttgagagtttttagaaggaaaagtaactaaaattactatcctacctcagtcagtgttaataaaattactattctactccagccagtgtaaaatatagagtgtattaatttttgaaataagggaaaaattgtaaaaatatcttattaactctccattttcctctcttaatatatttttaactcccaaataaggagaaaggaacttccctcattttcctccctttccttcccctcctttccccttgaatctcttttcatccctttcccttttaactcccaaacatagccttagagagtaaacttttagttgttttatccttgaatataatagaattttccctttcttcgttcactcctcctagaacaggtaccaccaaacctttcttagcttgtccagagttgtctattgttccgtcaatatatttggaaccaccagggctattagcttcaacatgctgtttctgtggcatagtgccttttgcctttggaacactttgcttttgatatatcccttaagctagttgcttggatatcaaaattgtattagaaagtgattcttcaattcctctttttttttttgttttgtttaagatgtcaaattgatgataaatcagagtatattatatatcttacaagatgatgcttctataaatattcaaaatctgtaatatgttatcaaagacagattcttctgatttaaaaaaaagtattgcttctgaagtaaaaaccttctttaaaaaatttgtttagttgaaataatgttaacgcaattaattttagataaaaagctttttttaaaggatatgataaagatatgaaacaatcacatgcaagcataaaaagataaagtaatatatttaagtgtttcaagaaaaataaatagttcaagtcacatactctcattttatcttcggagattcaactatatattcctacgtgtatgaaaaaaaaataacacaaattatattggttcacactactacaaaaagtagttttaaagacacaagctcaatgacggtccttctaaaaccgtccttaatttcaaaacagtggcatttttgtaaatataagaaacattttaaagttgaaatcgtaaaaccacgatgattttcaaaacaccatcgttgaaatagaacattcaaagacaggtgcttttaaaagccgtcttcttatgaggctgagtttttataatattactgctcacttcacaccttcgcacccccttcacctccgctcacttcatcttagaatgaggccatctttactctgctgaaggttgtagaggttggacttctctctcgatcgtgtcttccagtcccttgacgtctgcaatgttgtgaccgtcggcctcgatgccgtcaacaacctctagtgcgtcgtcgagatcaccatcgcacccctcgaacaaacccccctcagtgaaggtaggtctgtcgtgccaagaaggtgctctccgccctcgtcgccgcacgacaatagcttattgttaacacgacctcttcttcttcctgctgcattagcatcagagcacccactagggtttcttctgcaaacccaaccaaatggtatgttcctattctagctaaccaattaacgaaattaatttttgagtaactagtttcttctacctttgcaattttctttttcttccaacgaaaacactcaatggaatctgtcacaaaacaaggtttttttcccactcttttgacagaaaaggatccaaaataaggttagttagattatgagtctatgactatgactatatatatatatatatttgtatccctctatccttagtgattaattattggcattatttttttcattattttctttggtttaaaaaatttctattttatttgccctcaccattcattatctggtacttattgtcctctccttccattaataataggtatgaaagggcacaacttgttcttcagaatggagatcaaggatcttgcccgtgaggcacttaagagaagaaggtcttatactgtaatccacttgcctgtctaaaatctttgttttagttgagtttatgcatcataaatgagaatttaggggttaattatatcatttataattacagtgtgtaatgatacttgtggataggtagaatagaaggcacatcaatttttatgatgctacttaacaggttacagagcataaaatatttaactcagagcagtcttggttaattgtgatgggttctattttctggtagggtttatattgatgaattgtaggcatctaaattgtgggtgggtagcttatttccattcatatattgatatccaagatgaaactgatattttgttatgcttttattttttgcactgaacatatttttacatatgtttgctgaatgtcccttctctataggcatgcaaccagttgtttatatatatttttttattattttctgcactaatcatgttttgacacatgtgctctctctataggcatgcacccagttgatgggtcatatgaccatcaataatagtactcgagtttcttagacataaggatgggacttagagcaaggaagtcttggtggtatgtagatgcactactagaagtcttggtgttttttgaatcctccaaaatgagagtgatatcagcttttcaattttgaatccactactagatttctgaaaccactattgcaaggaagtcttaaacctttcttgatccccaaagctccacattagtgatagagcaagctccaattatagatgagaaagctattataaatttccattttcatcccttagcagaccaccagaatctacattagtgttttattttatccagcaagtctgtaaattttccgaagtaaaatattgggaaatgttagtggagctagcatatttctagctattaaatactattttgatgtagcgtgccgttttgatgactattaaatctcaagtatcaccaattcaagttgacattcaatttgatttataaatacattttaattagatcattttcattttgtaagttataacttaattcttcaaagtgtctgtttcgttattttttgtccatcttggtggtatgtagatgcaggatcatgagagaaaagtagaaagaagttatgcataattacatagtgagttttgagaggttgtgaatcaaatagttggcgtgcaagctgttttggagactgaaggctggggctaggtacataaaggtatacaaatattgatgcaattcaacaaatattcaaaaggaaaaggaaagattaatgagcaaaatttccacggatgttaatttgcatgtgttttttggtctgttgttatgttcgatgcttattgatattacgttgtcgagacgcaccaaaacaatttaactaagctaattctgtagcacagagataacctaggtcgactcagagacatgatcaatatggttctaacttcaattcaatggtaacagtaaggggagaattttatcaaacagtttgtgtgcgtaagtaaaacttgcaaaaatgtaaactaaaattaaagagcaacacagaaactaacagaattcaaaagaagtaatgtaaaacagaatttaaaacatcaatccaattcacctcaccaagcaattcgaatcatcattgttctcagaaattaatcctatcatgaaaattcattcaatctcattaggagcaactcaatcgacttaacccctaaattgattgaaaccataaccctaactgaaatatcatccaattaatctgtgattaatattcaaaattagtaaatgaatccataacctaatccgttttcaatcctaaacgcattcataatcatgaaaacataatagcaattgaagaagaagatgaacattcaaatagaattcgaaatactaaaccagaactcaaattctccttgtgcttgggttggattgattgaggatttagccttccatgatcattatcagtgaaagtcccatgaaatggttgcacgaaaatggaagcacaacaaaacgaaaatgaagaacaaggaagaacagtagagagaaaatgagagcaagggttttgatcctaaaaacttaagaaaaggaaatgcaaaactgtttttattaaaatgaaaagtgtgctccaagtttcactaaagtcactaatatatgtagtgactgagttctgaaaataaaatgggccacaaacaaacccaacaatctaattatttgctatttataaccatgaaagtcaaattcgcagcccaaaattacaagtgcagaggttctaatttcaaaggttaaaatgaccctctaaatgacagacttggcctcgggctatttctagcaaacttgtagatctttttgttatctttccagggactcctagaacactccattcggagatcgatagcaccctataggccctgcacaagtcagatatgtcaagtgagcaaaaatccgaaaatacgcaacaattagcaattaagtccatttacttgcctaagccaaaaactgaatcagaataggaaaataaaggtccaagagaggtcaaataaactaagaaggatagaaaaatactcaactaaaagcactctatcaaaataccccacacttaaacttttgcactcctgggcaaaactaaaagaaagactaagagaaaaattcaaactaaagtaaaccaaaaatttaaagaaagggtatgaacaaggcacacatatttttcaatggatcacaacaatgctcaaaagtgagagatggaaagatggaagaataatattgaggtaacaaacaatccatgaaaacatgaccacaaattgcaaagtgaaaaagtaggcaagtttagaatcaagaatgcaccaaggtgatagaattctctcaagaggtggcactcaaccttacatgatgtgtatggcttgtatttacactcaaacaccatatgcaactagcacatccaagcattgacaaacctctcattcattcaacttgaaatacacatgtatcaaaatatcaaaaggactttattagcttgtaatgaatgacttagggaaaggtggataagaaaaggatatttaggctaaagcttaagagaaaatgaactataacaacttttattgcatatattttttttcttttcttaaacttctttttctttgcttatacacaatttttttctatactttttcttcttttctttgaactttttctatttgaactctttcttttctctttttcttttcttttctttcaaaacaaaacaaaagacaaataccccacacttgtttgaaacccactcccaaaataattccaaagccccttttctccctaaagctagggtaacatgattttctatcatttttttttatttttaatgagctaaacaagaaagaaaaggctaaaggctcaaagagggtgacaatggatatcaacacaaggataggcttatttggctagtagctaaaagaaagaaggcctaaatcatctcaatcaaagcatgtgcaacaaagaatgtcaaaagaggcaaggcaaaacatagagtaatttagcacaagggtgaaatcacacatgaaagaacatattcacaaaggctcaaaaactcacaaggcataattctaccacacatgattcatcttaaattctatttctcgagcctacttatcacttcaacaattgcaacaatgattcacatcaagtatgaaacctctcaatccaaccaactttttaacatttctcacaatttatgcaaattagaaatcctatgaaaaacatgaaaaagtgtctaaattcaataaaaacagcaacaaaacataaacagacagaaacagcagaaatagacaacaaaaacatacagactcaaaaactaaaacagacaaacagaatatatacagacagatagacagaaaatagaaaacaatagacactgacaaacagacaataacaaaatataaacagacagaaaacagaaaataaccaacagacagcacaaaacataaacagacagaaaacagaaaataaccagagtttcaaaaatttagagacaacaaataaaagaagggaaaaggacactccccaaatgtcgttcaagacacatcttcacacaaaattggcaagaccaaagagatgtcttcaacaaactcttcctccacttgagggttctcatgaaatgctttgagttggtgaccattgaccttgaagactttgccggtagcttcatttttaatctcaactgcaccatggggaaaaacattagtaataacataaggtccatcccatctagatcgaagtttaccggaaataagcttaaggcgagaattaaacaataacactttttggccactatagaactcctttctaagaatcctagagtcatggaatttcttcactttctccttgtaaatcttggagtactcataggcttccaaacgaatctcctcaagctcttgcaactgaagcttcctttgcatacccgcttcatcaaatgccatgttacaactctttactgcccaataagcacggtgctcaatctccactggaaggtggcatcccttactgaaaaccacgctatagggagacatccccaaaggtgtgcggtaagcggtcctatgagcccataaagcatcctcaagaagcttgctccaatctttcctgtttggttgcacctccttctgtaacacttgcttgatctctttgttaaaaacctctgcttgcccattagtttgaggatgataagctgtagcaactctatgcacaaccccatacttctgaagcaaggatgcgaatgaccggttacagaaatggctaccctggtcactgataatggctttaggcacaccaaacctgcaaaaaatgttggatttcacaaaatccacaacaactttagaatcattagttctggtggccttagcctcaacccatctagaaacataatcaacataagcaaaatatatgaaaagccatgagaaacaggaaatggtcccataaaatcaataccccagacataaaaaatctcatagaaaataatgggttgctgaggcatctcatgtctatctgtaattgtgcctcctactctctgacactgctcacaagtggtggtaaagtgatgaacatctctaaacaaggtgggccaaaagaatccacagtctaataccctcctagcggtcctctgaggaccaaaatgaccttcggtaggtgtgccatgacaaaactgaagaatagactgaatttcatggtcaggcacacaccttcggatcacttggtcactaccaaacctccataaataaggatcatcccaaacataatatttagcatcacttttaagtttagctatttggaacctagatgcatgaggtgaacaacagatgcaacaaggaaattaacaatatcagcaaaccaaggtgtgacatgcgatgaatgcaaatgcatcaagtgctcatcaggaaaattatcacgaatgggaaaggactcaagaggtccttcaatcctgctcaagggatcagcaaccaagttttctgcaccacttctatccttaatctcaatgtcaaattcctgaagaagaagcatccacctgatcaatctaggtttagcatcaggcttcttcaacaggtatttcaaagctgcatggtcaataaagaccaaagcaagtaggatctaaatttatctaaagcaaaaacaatagccaagagctccttctcagtggtggtgtagttaacttgggctgcatccaaagtgcgtgaagcataagcaatgacatgggatagtttaccaactctttgggacaacacagtcccaagtgcataattagaggcatcacacatgagctcaaagggaagctcccaatttggctgctgcatgatgggagaggtagtcagcttcctcctcaatccctcaaatgcctctttgcaaggttggtcagatgtaaagtctacgtccttttggagaagcttagacaatggtaatgcaattttactgaaatcctgaatgaatctcctataaaaacctgcatgtctaaggaaggaacgtacttcccgcacagaagcggggtaaggcaaagaggtaatcacctcaattttggccttatcgacctcaatacctctactagagaccaaatgtcctaggactatactctcatgcaccatgaaatggcatttctcaaagttaggaacaaggccagtactaatacatcggtcaagcactctagagagactatccaaacatgcatcaaaagaggaaccataaatagtgaaatcatctataaacacctccatgcaactctctaataaatcagaaaagatgcttaccatgcacctttggaaggtgccacgtgcgttgcataggccaaaaggcatccgggtgtaagcaaatgtgccaaatggacaagtgaatatggtcttatgttgatcctctggtgcaatgtggatttgcatgtaaccagaaaaaccatcaagaaagcaataatgtgatttgcctaccaacctctctaaaacttgatcaatgaaagggagagggaaatggtccttgcgagtggcttggttgagtctcctgtaatcaacacaaacttgccaattgttggccactctagtcggaatcagctcattatcttgattcttcacaactatcagacccgacttcttaggaaccacttggacaggtgaaacccaagtgctatcagagatgggatagatgatccctgcagctagtagcttcgtcacttccttcttcaccacatcaagaataatgggattcagtcgcctctggggttgcctcactggtctagaatcatcctccaaaagtatctgatgcatgcagatggaaggatcaattccagggagatcagcaagtgtccatccaatggcctttttgtggcctctcaagacatgcatcaacttctcttcatgctccagtggcagactactagatatgataactggaagcttctaagcatcatctaaatatgcatacttgaggtgctcaggtaatgacttcagctccaaggaagggggctgaatagtggaaggtaagggaagactagaagctgaggaaagtgggatagtaggctcagaacttgtatctgtacctggaacacaatctgaggaaagtgcggaggaaatttctgcacaaatgctacagacagcagcagaatcatcacaggtacaattacaagaaccaagatcaaagtcagaaaagtcaaaagaaagatcagaaaaatcaaaaagtaaatcagaaatatctacattatctactgcagcatcaatgatatcaaggagaaaaacagaatgctccttgatagagtgcttttagttgagtatttttctatccttcttagcttatttgacctctcttggacctttattttcctattataattcagtttttggcctaggcaagtaagtggacttaattgctaattgttgcgtattttcggatttttggcttacttgacgtatctgacttgtgcaggacctatagggtgctactgatcttcgaatggagcgttctaggaatccctggaaagataacaaaaagatctacaagtttgatagaaatagcccgaggcaaattctgtcatttagacgtcattttaagctttgaagttagcacctctgcacttgtaattttgggcttcgaatttgactttcatggttgtaaataacaaataattagattgttgggtttgtttgtggcccattttattttcaaaactcagtcactacatatattagtgactttagtgaaacttggagcacacttttcattttaataaaaacagttttgcatttccttttcttaagtttttaagatcaaaacccttgctctcattttctctctactgttcttccttgttcttcattgttcttcatttttgttttgttgtgcttccattttcgtgcaaccatttcatggggatttcactgatgatgatcatggaaggctaaatcctcaatcaatccaagaatccaacccaagcacaaggagaatttgagttctagtttagtatttcgaattctacttgaatgttcaccttcttcttcaattgctattctgttttcatgattatgaatgcgtttaggattgaaaatggattaggttatggattcatttcctaatttcgaatattaatcacagattaattggatgatatttcagttaggattgtgatttcaatcaatttaggggttaagtcgattgagttgcttctaatgagattgaatgaactttcatgataggactagtttgagaacaatgatgattcggattgcttggtgaggtgaattggattgatgttttaattctgttttacattacttttgaattctgttagtttctgtgttgctttttaattttagtttacgtttttgcaagttttacttatgcataccaactgtttgataaaattcccccctcactgttattcgtaaattgaagctagaaccatattgactatgtctctgagtcgacctaggttagctctgtgctacagaattaacttagtaaaattgttttggtgcgtgtcgacaacgtgaaatcaaaactggcgccgttgccgggaacacggttcattgtgtgctagctttaatttgctgtaaatagttcatagtagtagttatatatatatatatatatatatatataaatatttgcatacattcactgcatattgacattctgttgcacaatttcattttgtcacatatttgcattgttgctgctgtgcattctgaagtatagatgatgtagttaatgtgtgttgtcaaaaaacagagaaaacagtaaaaaaaaaatagatcaaaaaacagagtagtagtagggagaaagtagtgtagtgtagttgtttttgtagtgtcattttgctgtcccaaaatttttacagcttgtgcagtttgagttgcgatttgtttcccaaggtttatccctcattttaaacaaaagcaacctctttaagggttgggtgtgggttcaaattggcaaattcgaactctaagtaggagttttggaccagtttttacaattggagtaggggcattctggtaatttcacagcaaactatctcagaattggctgaaattttaccagaaggtgcagaaaattcatatatcaagttgaacctattatggagtaacacgttcaccaggggtccaaatcgccaaattccatcatttaggtcattttttaggcaattttctaatttcatgatttttaaaaatcaccaaaagaatcacaaaaatcaatcatgatttttagatattcaatgttattttttttgatttttttcaaaaacttttagggtagttttccaatttctatttcatttcagcatatatagttagtagtgtcctggtagcatagctgtttgatatttctgtgctgtctgtgtttattgttccttatgagctgaactgtgtatgactaggtccacatcaagtgaattacattcatttgatcctgagatagataggacatttcacagattaaacagacataaccctaggttagatgacttagatgactttgatagtgtagttttagacagtagtgtagtatcttctgactttgactctgaatctgtttctactccttctacttctacacatcttgatatcatggctgataacaacctaactcttaaggagttagctacacctgatgttgtttaccaaccctggtgtattcaataccttgagactgaggtcagttattagctgaaatctggcctaattcatttgctccctaagtttcatggacttgctggtgaagatccacataaacaccttaaggagtttcatgtggtgtattccaccatgcgaccacatgatgttcatgaggattatgttaagatgaagacattccctttctctctggatggtgttgctaaggattggttgtaccttcaaccagatcctatcaccacttggactgacatgaagagaatatttttggagaaatttttccatgcctctagaatagcatccatccggaaggaaatttgtggcataaggcaattccctggagagtctttgtatgagtattgagaaagattcaacaagctgtgtgctacctgtcctcaccatcaaatcagtgagcaatttctgattcaatatttttatgaaggattgatgttaatggataggagtatgatagatggagctagtggatgcactctgatggacaagacccctcttgctgcaaggcagttgatttctaacatgatagccaactatcaacaatttggtgctagaatttcaacaactaaggtgatggctgccaatgaagcttctgtctctatggttgctgataaccagagattggagaacaaattgactgagttgacatcccttgtgaggcagcttgctattgggcaacaacagaatgtgatggtagccaatcaaccaaggctctgtggtatttgttgtgcccctgatcatcccacggatgcatgccccactctccaagagacagaacagtctgctgaagtttctgccatgcaacctggccagtcatttagacctcaacaacagtataatccttactccaacacttataatcctggttggagagatcatccaaatttgaggtatggtcctagtccacaacaacagcagccctttagacctccacagcagcccttccagcctgccactattaaataccaacctcccccttttagacaacaaccacagttccagcaacctgcagctgcacctacacaacctgtgcaggccagttctggaccttccttggaggatctgatgaagcaaatggccaccagcaatatccagtttcaacaaaatgtcagtgccaccatccaggacttgcagactcagattggaaagttagctacaactgtcaaccagatgcagcaacaagggtctggtaaccttccagcacaaccagttgttaatcataaaaatgtgagtgttattaccttgaggagtggcacagaacttccagatgctggtgctaaaattgatgccggtgctagtaaaaaagctgataatggtgccagaacagattctgcaccaaaacagattcccttaccttttccttctagagccattcctgcaaaaaaaagtagtggagcttgattctgatctgcttgagactttcaggagggtggaagtcaacattcccctcctggatgccatcaaacagattcaaaaatatgcaaagttcttgaaggatttgtgcacccacaagcggaagcttaagggaaatgagcaagtgaagatgggcagaaatgttttcacactgagccagggtaaaattgttgatgccatcccactatccaccttgccacagaagtgcaaggatcctggcactttcagtgtcccatacatcattggagatattacttttgcagatgccttgtgtgatcttggagcctccattaatgtcatgcccacatcagtttatagagcactacaccttggtgagatgaaacccattggtgttgtcatccacttagccaacaggagtgctgcgcttccacttggacttattgaagatgtgctggtgcgagtaaataatctgatcttctgttgcgtactcggcaagtacaccggtcgctcaagtaataaagtgataagaaagatatcattcccacggggattgtttgaccaattaaattataaatcgtatctataggttggatgacaaaaggtatgagagaaatgtgttgttgtgtgtgttcaaggtgaattaaaatctaactattaacataaagtattatgacaaaatagataatgattgtaccaaatgtaagctaatgtagctagggagacccacaccccatgctcctgacattcttacatggattgtttgtaacattcaactacactagctactcaaacatgcatcctcattcattaatagttaagccctaaccccttagtgacattaaccctttaacccttttcaataccctaatcctttagtcgtgtaaggaccctcacttttggccaggatcctttaaattagaaaactaagttttaggtgtggcgctgatcgcgccagggttggcgctgatcgtgccatgccctttggcagtggcgctgatggcgccaggacggcgctgatggcgacaaaggttcggccagttcacgtttgtagcgtgaacatggcgctggtggcgtggatgggtcgagaggttggcgcgggtagcgccaagggcaacgcggatcgcgccacaagtgccctggaaaaccaattttctcttgattctcacgctgatagcgccagaggtggcgcaagtggcgccacaggtctcgggaagttggcgctggtggtgcggatcgcgccagacctcgggcaggctgactatttaagggtcaaacgcgtttttgaagggaaaaactattccctcttcttccccacgaccccaaacctccatggatgacctgccaagcttcctacgaccttgttttgagtcctaaacacctccctatgacttttgattgtgagagaaaccttcagaaagctataatccttcatcctttctttaaaaaccccatttgagtgagagtttgaattctcaagtgagaaacctcagagaacttgagagtggttgagactcaaggcttggaacggacagagaagcttgtggaagctgtcctgagatcttctgagtcgtcactgaggtaagagactcaagtttctccgtttaattttgatcctgggggtttttatgaatagtgacccatatgagctggggctagaattagcccagggtcttgtagggaaacttgttgagagcattgaatagatgaaggattagctttcagtttttgattatgatgactttgaatcttggctctgtatatgcctgtgtgacttgtgtaaagtcacttgttgatggttctctgatgggctagagccttgattgcgttgtgctgagcccgagtggctagttgaacgagacttggagtgaaactcagtccgttctagtgataattgaggttaaggctgaggaaactatgccatgtatgattgtgttttgagtccagatgactcagaggcttggctttcagccttgagggaccttgaatggtctatgaccagccttgtgtggggctaagtttgactgaaccctaggatagaggaattctgatataagatgttctgtgaattggatgcttgagggcttattttgatatgagatttgcatgtgccttgattaggctttgattctgagactgttggtggcgggagccacagacctgggaaggaactgcagagtaatcccttaacaggtaagttcagtgttctctggggatgaattcccgttttggttgcacaccacactcctggggagtgttggtcatgattcatgctgcatgcattggctatggcattgtttggattgattttatatgcatctgtattggatgaatgtatgctatgattgagatatctgttggccaatagatgaataccgtcattgaggagctctgccgggtattcaaggcgttgaggagctccgcccattggccaatagatgaataccagcattgaggagctttgctgggtattcaaggcgttgaggagctccgcccatggcattgaggagctctgccatatcttgacaggtactgacgttgaggagctccgttaggacgttgaggagctccgccaggcattgaggagctctgccacctgtcatgtattgagattatgattatgtttatgattctgatatgttgagggccagagggccaggccagtgagccttgtttgttatgttgcctgcatgtgtgatgtggatttgtgagccagggtgggaatgatttcccagggaccctgagcttactaagatacgttatctcaccccgtgtgggggttttctatgatttcaggtgaccattctagaagagaagatcagtctcagggcaagaggcccagcagagactaggctgcttgactgaggagcggcatggagagcttgaaggctctattttgtttctgttttgatgtatagttctgtataccctcgaggagggttgttattcttttgtatcaccatagagtggtgtgaacattgatgtatatatgtacagaactatttgagtttatgatatgagactttccctgagtatatatttgttgtacatgtgacaatctgcctaagtagtagttatctgtcttaatgatgtatgatataatacactggatcagcaggggcatgatatatgttatggtgtgtgtgtgtgtgttatctgatatatttgtgattccatacataatgtatcaagaaaagagattctatgcttccgctgagttttataaactatgttttaagtgctaatctgatattattaatgataacacgtcgtaggcctacggggtgttacatttaatggtatcagagcggtttcttgataagaacattatgtatggaacttgttttggtgcctgtgtgtgattgtttgacatgagcattacatgggggtacattaacggtgggcctgatcaactcactgtgtgatgtacatgtagtgctatggtgagacctagaggcaccagtagggctaccagtgctcagcctgatccagttgtgactgcactagccgctatgcagcaagagctagctgcaaacagacagatacaggcagagatacagcaagagatggctgctaatagacagactcagggggagatgcagcaagagatggctgccacccgagaggtgaatgaggccttgatgaaggctaaccaggacctgttagaggaggtgaagaacctcaggagggatgacagagtatcctccacacctcctgcacacgagggcgaggctagtcgccagcaggctggtgggagtcaccagcgaggggaccagatgttctagatagaggctgacagtgatgttgcagctagagggaagatgctgatcacattcaggaagcatgaccctccagtgttctcaaggggctatgatccagtagccgcagcaggatggctgcaagccttagagaagattttcgaggtgatggagtgccccgaccaccagaggttgctgtatgcaacctatatgcttcagggagatgcccataagtggtggaagaccactgtcccacttctaagaggccggggagaggtgattacctggcagctgttcgaggcctgcttcatagacagatattttcccggagatgcccgggagcagaagcaggcggagtttgataggctcatccaggggactatgacggtggatgagtatctggcctagtttaatgagctggcccagtatgctcacttcaggagacctatgcctgatgctgagactttagcagttaagttcctgagagggcttagagatgatatccaggtgttggtggctggacttgggtcacgagacatggataccctagtgagagagagtcgtcaggtggagggtatcctacagagacagcagagaggcggacagcctactccctcagtcagacaggaggggagaaggcctagtggttctggcccactcgggaagggtaagggcaggatgttgagagcctctgcaccctctgatagattcaagaggggtctacctcggaagagatttgcttccaagtgttcagcttgtgggaaggagcatatgggagcatgtgcatcaggtcagatcatctgctacagatgtggcaagccaggccacatggctagagagtgccctcagacagagagtcgggcacaggcagcttcagtggagatgatggcacccatagcaagccgggtgtatacggtagatgcctgatgtgttgcaaacacatcttaaatatagtattagtttaggtcatatttagagtaaatagttagaaaatagtataagaattaggcatatttaggattttatgttacataaagcattttaataccaattgagtgtttgcaggccaaaaagagggaaattaagagcaaataaagaagaaaacaacatctgccatctcacgcgcatcgcgccatatgtcacgcggttcacttgaatgtccagaagggatcacgcgagaagcgccacatttcacgtatgtcgcgtggaaacttcaggttttaagccaaatcttcactgcttatccacgcgatacacttgacattccacgcgtgtcgcgtgaggacttcaagaaataagccaattcaagtctgctagtccacgcgagtcacttcatatgccacgcacatcgcgccattcttaactgccaagtcacgcgcatcgcgtggtgtcgcgcgcgagtcgcgtggacctgtttttccttcctgaattaaagaatatttgcttcgaaaataggacaaagcttgggagaagttactgtaattaaaaacattcaataaataggagagttttctgagcttttggggagataattttttttcacacactgagtcttggagatacaatcatacatagagaatagagtattattattattgaaggcaaaccctaggaatcaagattgaagccaattctgcagaatcatgtttcatccaatcgctttggtgttcttgaggcctatggctagctaatcttcttgttgtggaaaggccatgaacttatgagttttccctctgtaaattgactggtattgaatgcatatgttttgtttatttcaattcttctctgtgtttaatcataatcttgtttagaattgatcactctgaatgagtattgagagttatacttcgcaatggacacgttggaattataatatctgacctgttaagattgacacttgttcttcacctagacatagggatgcatgagtgcggagattatcatatgttctttgattacttgaattgactagtttcactaagacattaggttatgaaatcaatttaaagggttaattcactaagacattagggattagctaaaataggaaagacttattctccgaataaacataacacgaacccataagatttgttctttgacttcttagtttgacagaatcgctataaggttagggttctcgatcgaattagagggtgaaatcgctggttaatgctcttaagagtctaggatttacgaaattaggagagacttgtcttatgtaaacttaaaggtaaaatcatcagtcaattgaaggaggtgatacttataagggattgagcctgaccacaattacttctcattggtaatctttcgattttaatttactgctttatttaatttctttattcaattcaacacaatcatccaacatactcttgcgtaattttctgtttctgttcaatcacaacttttacaattattgcgaaatctttccaatccctgtggagatgatactttacttacacttttattacttgttaaacgatcggtgcacttgccgtataaacacatttgtgtaattttgacaacaagtttttggcgccgttgccggggattggtaacagaattttcaataatttaaattttgtgattgagctattgctactaaccacttctcttgagtttttatgcgaagttcagctagctctgagggattggaatttgaccctgaaattgaaagaacactccgaaggaggttagctagacaaaaaaagagagaagcggaactttttgactttgattcacttcctgaatttgagtcggaagagatggctgaagaactacgtaatcagcccccaccaaggctaaggcctgaagatgaacttatggaggatattctggctcctatgttcacaagaccaaactccagtattgtgagaccaccaatccaagcaaatcatttcgatataaacccttcattgatatcattggtggagcgcagtcagtttggaggagatgattcggaagaccctcatgatttcatagatagattccttagaatctgtgacactattagacaccagggagtttccgatgatgctgtgaggctaagcttattcccgtttgctgtgaaagacaacgctttgagatggttgaactgccaaacctctaacagtatagcaacttgggatgacttggtttcaagattttttgcagagtatttctctatggataaatacaatcgattggtgaacgagatcaccaattttactcaaagtggaagagaaactctatgcaccgcgtggaagagattccaagcactagtaaggagatgccctcaatatgatatgcctgtaggtaaacaggtcagaatatttttcaatggcatgactcccgagacaaggatgatggtaaacgttgcagccggtggtactataagatccaagaccgccgcacaaacatatgagttgatcaaatctttggcaagaactgagaatgaaagccatacaatgcagccaaagagagagcccatccaattaaataccaatgatgcaatgcttgcagagcaaaagattctagcacaacaattagccaaattaagtgagaagatggatcgattgcaattttctgcagcacaagtgggcacaagcaaaccatatgttgtgtgtgagtattgccaaggtgagcatgagtctaacacttgtcctattttagttggtgctgaccctgtgcaggtaaatggcgtatggaacgatcaaaggcagcaacaacaaccataccagcagcaaccataccaaaggaacaattatgcaattggaaacaattatcctagaagatttcaaggaggtggtttggattacaagtccaacaactacttgcagcccgctcctattccgaataaagaaccttccgagttagaaaaagcggtgatacaactaactaagaccaccacagagtttatagctgaaacaagagctcaccggaccaatcaagatgcttcaatcagaaatttggagaatcaaattggccaacttgcaaaacaaatggctgaaagatcacaaggtcaatttccaagtgacacggttgtgaatccaagagaacatgccaaggcaatcacaaccagaagcgggaaagtattagtaactccggagaagcccgaatcaaatgttccagaggtggagaaaaatcctgcagcaaatgaaaaagaagaggaaaaagttgcagaaaatttggaagaaaaagatcctatgccaccatcaaagaagtcggatttttcgcgctttgaaaaacctccgtatcctatcttgaccaagcaacaagagcagaagcgtcaatttttaagattcttggagatgttcaagaagttgcatatcaacataccgttcgcggaggcattggccaacatgcctaactatgcgaagttcatgaaagaacttctatccaacaagaagaagctaaaggagtgtgaaacaatagcattaacggaggagtgcagcgcaatcatccaaaggaagcttcctcctaagttgagagatccagggagttttaatattcctattgctattggtaatattgatgtaggaaaagcattatgtgacttaggggctagcataaatttaatgccattatcaatgtgtaagtccctaggcataaccgaacttaaaccaactagggtatctttgcaattagcagataggtctttaaggacaccctccggagtaatagaagatgttctagtgaaggtagataagtttatatttcctgcagacttcattgtgcttgatatggaaggggaaagtgaaattcccctacttttaggaagatctttcctagccaccgctagggccttgatagatgttgagcaaggcaaattagagctgagattagataatgaatctgtagtttttagtgtgtttgatgcaataaaacatcctaatgatgagcatgattgttttcgtatagatgtattggatgaagtaatttgtgcaggttttaaatcaagtgttgcagcaattgatgaggaagatatatcacaagatgcaaccagcactgcacatacgaataatgcagaaaaaccaacaacactagcacaagcacagctgcagaattatgaatccagagatgctaaaaataatgcagaaaattctgcagcagaggataaccttgcaacagcacatgcagtgcaagaaaaagctgcaacaactaattctaacaatgccgaaacaacaccagcagaacatgaattagaagagctagaagttaaggaagatgacattctttccggtgcacccaaggttgaaattaaagagttaccagaacatttgaagtatgtcttccttggagagcatgagacttatccagtaatcattaacagagggctggattggcatgaagaagtcaaactgattaaagtgctgaaggaacacaagtccgctattggctggtctatttcagacctcaaaggtataaatccttccttttgcactcataaaattttaatggatactgacgtgaaacctgtgagacagccccaaagaaggcttaatcctgtaatgaaagaagtggtaagaaaagaagtcgtcaagcttttggatgcaggtatgatttatccaatttctgacacaccatgggtaagtccggtccaagttgtccctaagaaaggtgggatgacagtgatacaaaatgaaaagaacgaattgattccatctaggacaatcacgggctggagaatgtgtgtagactaccgaaggcttaatgacgcaactcgtaaagaccattttccacttccattgatggaccaaatgctggaacgcctagctggtcatgactactactgtttccttgacggttattctggatataaccaaattccagttgcaccggaggaccaagagaagacagcatttacttgtccatttggggtattcgcctatcggaggatgccatttgggttgtgtaatgcacccgccactttccaaaggtgcatgctttccattttttcagacatggtagaaagaggtctagaggtatttatggatgatttttctgtttttggaccttgttttgatacatgtctacttaatttagctaaagtgttaaaaagatgccaagaaactaatttagttttaaactgggaaaaatgccattttatggttagagaaggtatagtacttggacacaaaatttctgaaatgggattagaggtagatagagctaaactcttgcttattgagaaattacctcctcctattaatgttaacggtgttcgtagttttcttggccatgcaggattctatcgtcggttcattaaagacttctccaaaattgcaaagccactcagccaattgctggaaaaagatgcagagtttgtgttcaatgatgcatgcctgaatgcatttaatgttttaaaacaaaagcttacaactgcacctgttataacagctccggattggagtttgccttttgaattaatgtgtgatgctagtgattatgcagtaggtgctgtcctaggacaaagaaaagagaagaaattgcatgttatttattatgctagtaaagttcttaatgaggcacaagttaactatgcaaccacagaaaaagaaatgctagctgtagtttatgccttagataagtttaggtcttatttggtagggtctaaagtaatcatttacactgaccatgcagctcttaaatttttactgcataaacaagatgcaaaacctcggttattgcgatggatgttactcttgcaggaatttgatttggagattagagataaagcgggagtggagaacaaagttgcagaccatctatcccgaattcaacataaagaactgcaagatggaccggagatggatataaatgaagtctttccagatgagcaattatttgctgttggagttactccatggtttgctgaaatggcaaactttaaggctgctaaaatcatacctgaaacattcacttggcagcaaaggaagaagtttctgagtgattctaataggtatctttgggataatccttacttatattttaattgtgctgacaatattatccgtaggtgtgtacctgaaagtgaagtgccggacatcctttggcactgccattcatcaaactacggaggacatttcggtgttaaccggacagcacaaaagatcctacagtgtggctactattggccaactatattcaaagatgcaaaggattttgtacaacaatgtgataattgccaaagaactgggaacgtttcgcgaagagatgaaatgcccttgaacaacatacaagaagtagaactatttgatgtatggggtatcgacttcatggggccattccccaaatcatttggtaaccaatatatcctagttgctgtggattatgtctctaaatgggttgaagcaacggcattaacaaccaatgatgctaaggtggttataaattttctgagaaaatacattttcacaagatttggtgtaccaagagccataataagtgacggaggaacacatttctgtaacaagcatcttgaaagcttgttagccaaatatggagtgaagcacaaggtagcaaccccatatcatcctcaaaccagtggccaagttgagatatccaaccgcgaactgaagcgaattctagagaaaaccgttggaacatcaaggaaagattggtccaagaaattggatgatgctttgtgggcgtatagaactgcattcaaaactccgattggtatgtctccctttcaattgctctatggtaagtcttgtcatctaccacttgaacttgaacacaaaactttgtgggcacaaaattcttaaattttgaactaaccaaagctaatgaaaagagattattacaactgaatgagttagatgagttcaggttgaaagcttatgagaatgcccgcatttacaaggaaaagacgaaaaagtggcacgacaaccacattagacacaaagaattcattccaggccaacaagtactgctatacaactcccgactgaaactttttccgggtaaactaaagtcacgatggtctgggccatttctggtaagagaagtttttccctatggtacagtagcaatttcagccttagatagtgataaagtgtttaaggtaaatggatataggctgaaactctactttggaggtaaggtggacaggaactcaagctctgtaccacttcaagctaacattgaatgaattgacgtaaaagtctagcttcaggactttaaacaagcattggattctgtatataagtttaaattcagttgatagtcttagattttaattcatgcaatttaaattcatgcaccatatttaattttgagtcatttcaattttatctaaataagtaatagtactagttaagttatttccagtaggagtagttttagttataaggtgagaaaattggagagtggaagagaaaatataaaggtagacagaaaaagcaagtcacgcgactcgcgtggccaatcacgcacatcgcgccatgcatactgtcattccacgcgagtcacgtggaaaccaagcgactcgcgccatctgcaacaaacagcttttattatctgcataaattcgcgtatcacgcgtgaaactcaagtgggtcgcgccacaaagcagtgcttaatagccttatcccacgcgacccacgtgataaataacgcgactcgcgtcatagctagaaactcaaaaggcaatcaggttaatccacgcgacatgcgtggaatacaaagtggatcgcgtgaaaccacagagccaaaatgaccaattccacgcgagtcgcgtggaatgtcacgcgactcacttgaaatgcccaaacccttactggagtatggcgcgacatacgtgatacatggcgcgcatcgcgtgagtacgcggagacagtttttaaataaaacccaaactcgcgcctctttataacactcttcccaaattccctccgtctctctcgccctcaatcccttaactccctcaaacccctttaaccaccataaactcccttaaccccacttcctctataaaaaccatacattagtgttgcctctctgtgcatttctaaactttaaaaatctctgcattcatcttcacaagagccatggccaaggacaaggtgagtgtcacattctgacaaccttaggatagccacgttttcaattttgtacatataattatatgcttctaccctttcttttgtctgtggtctggaattctctagaaaattttcggattttgccatatacccaacgcacacaccatgcttattcatttttgtgcccaccacatgtttgacaaaatgcctgagtgagtttttgaacgattttgcacctaatagaactcaataggcataggggttgagaagaccaaatgatgtgaagacaaataacacttggtatggtctacaatgttgactagtatcaattatttgattgttagagacaatttgaaataagttaagccatcaaaactgggaataaatggagtagattgaggaatgttcagttgttttggatacacatatatatgaaacgcacatacatgacttgttgattgtgattgcttacatgattagaattaaaaatgtcatgcctaccattgatttagatgtctcctttaatgtacataaggaacatggtataagtaaattggaacttcctacaaaataatgataacaacatcattgctcttaggaaatgatctaaaattctgcattagttttaccattgtgttgaatgcattatatatataacatggtaagattaaaagtcaagcatgacaataacaatatagtgaaagatgctaagccatgcaatgaaacttttatcatgatatcaacttaggaagatttgaacttagtcgctgcactatctctaatactctctaaccaacttcctggagtaaattaatgaattgtaagattcttgatatgcattgtgactttacttgaagaaatctaatccgcctgatactaagctgttgattataatataaattttgttcaggtgaaccgatgctcaaagtaaatgcttgctatgaattagaatgctcaataatgtgtataccatgatagaatcaatctagataaccatagttaaagccgaaatctgggaattgtaggctagatatataaattcgaattaaccattcatggtgatatgaccaaatatctttttaatctagaactgtttatgcaaatgtcaagtgcaggaacctaattcgttgagactaaatgagtacctttattacattgggtatggttaaagcttaaatttgggaatgatggttccaaaaattgattacacccaataatgctatagtaaccggtgacagtgatgtgactaaatttccatataagatacagagttggattgaacatgtcttgctttgatcttatcaacaaaataaatctgggaatcctaagtgtgatttcctaataaatgatattcaattcttgtgtttggatttttatataaacgattgcctgttcctttgtgaatatttcattaagctaatgttgggattttctgtttcagggtaaacaagttgaacaggccacacaagctaaaaagggaaagaagaaagtaacaggagagagcagtaagaagagggctagagtagcggattttgatgagctacgcttccgcactgcagaatgtcaagcaaaatttgattcttggtacttacccaagaagattatcagggagcggaagatcatgtgggaggagttccctgaggaccatcctatcagacaggtcatagtccgacgcaggtggcagagacttgtctccttcccagagcccagcagcagcatgatcctcaaggagtttctctccaatgtggatcatgacacagtttaccggaccaggatctcgtgggtgagaggggttcagataccatttggagagaagaccattgaggctctactcgacaccgactacgatccattctccgcatgcgacttcatccgattattttggcacatgcagccggacgcggtcacgaagatgtataatggtgacgttccggagttagccactaccatccgccgagctattacatgcttatactcagcttggcagaccaagcccagcatggactacataccagacaaattgaagaagtccgagctggtaggagatgccgctttttggcacttattcgtgaaccacacggttatgccatctaggaacctaaccgatgtgaacgttgagcgcaccattctcctctatattctccgtggggcaggtaacctccttatttcttcagtcttatctgataggattctacagatgatacaggacgtcggcacgcggtcttggattggccactcttcactcattctacttctttgtcggcacgcgggggtacatattgacgaggacgaggacatggatgtcccgatagcgccgctcatgacctataggacttatacgaccgctatgagcgctgcagcagatgagcaagtggttagagcttctaagctcacacctgaggccattgccgctgcctctcctcgagaatttcctgcagatgaaccccagcctgaccagcatgaccagccagctcctacaccaccagtttcccccactccatcgacttcaccaccacatacttctatgccaccaccaccacctatacccacacgcaccccactctacgaggactcccggagctttattgacttccagcagttcgtgaggacccagcttgagttccagagtgagcagctagccttgcagacgcgcatatggggagctgtttgccagcatttgggcattgccccttcggagtatcagacctcagtgccggcacacccaccacagccttctcagcccgttcctgcagccactgatcccattgatcaggcctcggacgcagacaccgcagtgacacagccattagcttccgagcagacagagatggctgcagaggacaaagaccacactgattgagcaggacttttattttattctattttcagacttatgttgggattattatttttagtattctgcattttacatacattttattcttctgcacatttacatctcatcgacattctattactcacactttgatattacagcatcatattatatatagtacagttatagtttataatttttcttatccaatctgttttgacgatcaagaattgaatgcgattttccgaataatgcttaaatttttccaaggcgctatgaccaaatttgtggttgctgaggacagcaacatataaatctgggaatagttaccgcattatttcgcaaatcacaatcaagaataaaaaggagtctaacagaatttttgaaaatttttcatataatcagaatttttcaaacaattaaaaaaaaaataagcagcacacaaaactttttcagattaagaaaagcggatgaactcaataatagacatatttctctgaattgaattagatgaaataagagacatggactgcatgatgcatgagtagaatttgattgataatatgtgaaactcatgattggatgttgaaatgatgccagatatgcagtcaatcaagaacgattgagtcacagcacctgtaaggttttgagccaaatgtcggtaaattttcttctgagagactccatgctttatagtattctagaacttgatttgtttctctaagtgcaggtgtgacttgaaatgattaaggcatgatttgttctgaaaactagggccaaattaacctacctaaataaaattttcctttgaacctaaatttgagcctaagcctttcatttcaataacccaaaaattaagccatgaccaaaatgactaaaccttttgaggcttaagaaggtgaactaagtccatgtcagaaaagtgctattgaccaaggaatgaagaagaaggagaagagaaatcaaatgaatgaaaagaaaaagttgaaattatcagctgaaaaagttcaaaaagctgcaagcaaaaatatttaatatgttctgattacaaaatgtttgataagaaaaatgtgaaaaagtaaaaagaagtagtattatgttattttgaataaaagtaccagtttgaagaaagaaagacaaagagcatggaaaactacagtatacttggacttagggaactagacttagcctttaaattgagctacttttcccaaattaattcatacccttagccaagccacgttataagctttaaaagaccttctgatcaagtcatgattgtaactaatgagaatatcttcaagcctatggtaatgctttaatcatgttgagttagagggtaattacaacctgaaacacttgagtgaaatgagtgattataaacacaatctgtgaggtaaactcaagtagttcttatgttgatagcaatgaaagcatcatggaggatttaactgagtagatcatacattcatgatagttttatgattgaaaattgtggtttttgttgattgttgattcttgcttatgtcttagaactctttctattgctgaggacagcaactttcaaatctgggaattgtttgatgtgttgcaaacacatcttaaatatagtattagtttaggtcatatttagagtaaatagttagaaaatagtataagaattaggcatatttaggattttatgttacataaagcattttaataccaattgagtgtttgcaggccaaaaagagggaaattaagagcaaataaagaagaaaacaacatttgccatctcacgcgcatcgcgccatatgtcacgcggttcacttgaatgtccagaagggatcacgcgagaagcgccacatttcacgtatgtcgcgtggaaacttcaggttttaagccaaatcttcactgcttatccacgcgatacacttgacattccacgcgtgtcgcgtgaggacttcaagaaataagccaattcaagtctgctagtccacgcgagtcacttcatatgccacgcacatcgcgccattcttaactgccaagtcacgcgcatcgcgtggtgtcgcgcgagtcgcgtggacctgtttttccttcctgaattaaagaatatttgcttcgaaaataggacaaagcttgggagaagttactgtaattaaaaacattcaaaaaataggagagttttctgagcttttggggagataattttttttcacacactgagtcttggagatacaatcatacatagagaatagagtattattattattgaaggcaaaccctaggaatcaagattgaagccaattctgcagaatcatgtttcatccaatcgctttggtgttcttgaggcctatggctagctaatcttcttgttgtggaaaggccatgaacttatgagttttccctctgtaaattgactggtattgaatgcatatgttttgtttatttcaattcttctctgtgtttaatcataatcttgtttagaattgatcactctgaatgagtattgagagttatacttcgcaatggacacgttggaattataatatctgacctgttaagattgacacttgttcttcacctagacatagggatgcatgagtgcggagattatcatatgttctttgattacttgaattgactagtttcactaagacattaggttatgaaatcaatttaaagggttaattcactaagacattagggattagctaaaataggaaagacttattctccgaataaacataacacgaacccataagatttgttctttgacttcttagtttgacagaatcgctataaggttagggttctcgatcgaattagagggtgaaatcgctggttaatgctcttaagagtctaggatttacgaaattaggagagacttgtcttatgtaaacttaaaggtaaaatcatcagtcaattgaaggaggtgatacttataagggattgagcctgaccacaattacttctcattggtaatctttcgattttaatttactgctttatttaatttctttattcaattcaacacaatcatccaacatactcttgcgtaattttctgtttctgttcaatcacaacttttacaattattgcgaaatctttccaatccctgtggagacgatactttacttacacttttattacttgttaaacgatcggtgcacttgccgtataaacacatttgtgtaattttgacaacaatgccagagaggcggccagagctccagacctgatcagaggtacagttctgatcgatgattatgatgttagagttttatttgattcaggagctacacattccttcatacgggatgcggtagttgagaggctgagattgcctaagattagttttacccctccgatggaggttaccacagcttctagagaaagatgccaggtgagcacgtgctgcagggacgtgcagtttgtctatgagggcagagcttatgttattgatctattctgtctagctatgcctacccttgagatgattctgggtatggactggatgaccaagtacggtgtgatgctagactgttgtcagaagagcgtagttgtgccttctgacggaaccagttcgagttctgcctcattcttatcagtcttgcaagctcgcaaggcaatcatggagggagctcagggctatattttcttgggtgtgacagaagataagccaggtgttgttttgtctcagatccctgtggtgagcgagttcgtggatgtttttccagaagagataactcagctaccaccagagagggagatagagttctccattgatttggttcctggtgtgggaccaatttctgtggcactttatcgcatggctcctctggagttgagggagctgaaggtgcagttggaggacctgctgtccaaatagtttatcagaccgagtgtctcgccttggggagcaccggtgatctttgtgaagaaaaaggacggtagtatgaggttatgtgtggattacaggcagttgaacaaggttactgtgaagaacaagtatcctctgcctcgtatagatgatctgttggatcagttgaggggagccagagtattctccaagatagacctgagatctggatatcaccagattcggatcaagccggcagacatacctaagacagccttccggtctaggtatggccactttgagtatcaggtcattccttttggtctgacgaatgccccagcagtgttcgtggactatatgaacagggtattcagaccttttctagatcagtttgtggtggtgttcattgatgacattctgatctattctcggacggaaacagagcatgccgagcatctcaggacagttcttcagatcctgagggacaagcagctgtatgctaagttggccaagtgtgagttctggttgacagaggtgaagtttcttggccatgtgatctcaacagctggtgtatctgtggatcccagcaagatagaggcagtgatgtcctgggagaggcccaaggacgtgtctgagatccagagtttcctgggattagctggctactataggagattcattcaggggttttcccagttggtggtacctctgactcggctcacacggaaaggggttccttttgtctggacccatgagtgcgagtagtgctttcaggagttgaaggagcggttgaccacagctccagtgctgactcttccagatcctgagggagtctttgaggtattttgtgatgcatccaagcggggacttgggtgtgtgctgatgcaggagcagaaggtggttgcctatgcttccaggcaactgtaacctcatgaagagtcgtatcccactcatgacctggagttggcagctgtggtatttgctctgaagatatggaggcactatttgtatggtgccaagttgatagtgttcagtgaccataagagtctcagatacctctttgatcagaaagagttgaacatgagacagaggcgctggatggaattcctgaaggactatgatttcgagctgagataccatccaggcaaggctaatgtggttgctgatgccttgagtagaaagaatgtgactgttgcatgtatgatgatcttttattgcaagctgatagagcaattcagagatatgcacatgacgatgacagaaggtgcacatggtcttgagatgagcaggaccaaagtagataatgagctgatgaggaggatccgagaagctcagcagcaggatgaggatgtgagggccatgattggccaacaacatgtttcttgggaagaccacgacttggtgaaataccaaggtcgtattgtggtgccgaagggcgagttgagagatgtcgtcctatctgaggcacatcagggccagttcagcattcatccaggagccaccaagatgtatcatgatctgaagaggagtttctggtggctagggatgaagaaagacatagccgagcatgtggctaagtgtctagtgtgtcagaaggtgaagattgagcatcagagactgtcgggtctagttcagcctttagagatccttgagtggaaatgggaaagcatttccatggatttcgtggtgagattaccgaggacgtagagtggatgtgattccatatgggtgattgtggataggctgaccaagtctgctcatttcttgcctgtgagatatgactacactacagagaggttggcccagctatatgtcagggagattgtgagactgcatggagtccctgacagtatcatcagtgatcgagacccgaagttcacctcaaggttctggggtgcgcttcaggaggcttttgggacccagctcagactcagcacagcttaccatcctcagacagaaaggaccatccagactctggaggatatgctgagagcttgtgccttggagcaaggtactagttgggacagatatctacctctggtggagttttcatacaacaacagttttcatgccagcctgggcatggcaccctatgaggctctatatggccggcggtgcaggactccagtgtgttggacagaggtaggagaaaagcagttgcttggaccagagatggttcaagagacctctgagcagatcaagatgatcagagataagctgatgaaggctcagagtcgacaaagaagttattatgatcagaagcacagacccttgcagtttgaggagggcgatcatgtgtttctaaggctatctccagtgacgggcgtaggacgagctttgggtgtgaggaagctgagtcctaggttcattggtccttatcagatcttggagaggataggaccagtggcatataggctagctttgcctccccagttgtcaggacttcatgatgtattccacgtgtctcagttgaggaagtatatggcagatccttcacacgtggtagagcctgacacagtccagattagagataatctgacaagtcctacacgacctatgaggattctggatagaatgaagaagcagatctgcaacaagaccattcccatcgtcaaggtacagtgggaaggcaggatgcctgaggaagcaacttgggagcgggagcaggagttgctgcagaggtatcccgagttggctaacaggtatgattctgaattttgcggacaaaattcctaaaaggaggggtgaatgtaaggaccctcacttttggccaggatccattaaattagaaaactgagttttaggtgtggcgctgatcgcgccattcgctttggtagtggcgctgatggtgccaaaggttcggccagttcacgtttgtagcgtggacatggcactggtggcgtggatgggtcgagaggttggcgcgggtagcaccaagggccacgcggatcgcaccacaagtgccctggaaaaccaattttctttggattctcacactgatagcgccagaggtggcgcgagtggcgccacaggtctcgggaagttggcgctggtggcgcggggttggcgctgttagcgccggaccaccgccattgtggcgcggatcgcgccagacctcgggcaggctgactatttaagggtcaaacgcgtttttgaagggaaaaactattccctcttcttccccacgaccccaaacctccatggatgacctgccaagcttcctacgaccttgttttgagtcctaaacacctccctgtgacttttgattgtgagagaaaccttcagaaagctataatccttcatcctttctttaaaaaccccatttgagtgagagtttgaattctcaagtgagaaacctcagagaacttgagagtggttgagactcaaggcttggaacggacagagaagcttgtggaagctgtcctgagatcttctgagtcatcactgaggtaagagactcaagtttctccgtttaattttgatcctgggggtttttatgaatagtgacccatatgagctggggctagaattagcccagggtcttgtagggaaacttgttgagagcattgaatagatgaaggattagctttcagtttttgattatgatgactttgaatcttggctctgtatatgcctgtgtgacttgtgtaaagtcacttgttgatggttctctgatgggctagagccttgattgcgttgtgctgagcccgagtggctagttgaacgagacttggagtgaaactcagtccgttctaatgataattgaggttaaggccgaggaaactatgccatgtatgattgtgttttgagtccagatgactcagaggcttggctttcagccttgagggaccttgaatggtctgtgaccagccttgtgtgggactgagtttgactgaaccctaggatagaggaattctgatataagatgttctgtgaattggatgcttgagggcttattttgatatgagatttgcatgtgccttgattagggtttgattctgagactgttggtggcgggagccacagacctgggaaggaactgcagagtaatcccttaccaggtaagttcagtgttatctggggatgaattcccgttttggttgcacaccacactcttggggagtgttggtcatgattcatgctgcatgcattggctatggcattgtttggattgattttatatgcatctgtattggataaatgtatgctatgattgagatatctgttggccaatagatgaataccggcattgaggagctctgccgggtattcaaggcgttgaggagctccgcccattggccaatagatgaataccagcattgaggagctctgctgggtattcagggcgttgaggagctccgcccatggcattgaggagctctgccatatcttgacaggtactgacattgaggagctccgtcagggcgttgaggagctccgccaggcattgaggagctctgctgggtattcagggcgttgaggagctccgcccatggcattgaggagctctgccatatcttgacaggtactgacattgaggagctccgtcagggcattgaggagcttcgccgggcattgaggagcttcgccaggcattgaggagctctgccacctgtcttgtattgagattatgattatgtttatgattctgatatgttgagggccagagggccagagggccaggccagtgagccttgtttgttatgttgcctgcatgtgtgatgtggatttgtgagccagggtgggaatgatttcccagggaccctgagcttactgagatacgttatctcatcccgtgtgggggttttctatgatttcaggtgaccattctagaagagaagatcagtctcaggacaagaggcccagcagagactaggctgcttgactgaggagcggcatggagagcttgaaggctctattttgtttctgttttgatgtatagttctgtataccctcgaggagggttgttattcttttgtatcaccatagtggtgtgaacactgatgtatatatgtacagaactatttgagtttatgatatgagactttccctgagtatatatttgttgtacatgtgacaatctgcctaagtagtagttatctgtcttaatgatgtatgatataatacactggatcagcaggggcatgatatatgttatggtgtgtgtgttatctgatatatttgtgatttcatacataatgtatcaagaaaagcgattctatgcttccgctgagttttataaactatgttttaagtgctaatctgatattattaatgataacacttcggaggcctacagggtgttacaagtcgcatttattaggttaagcattaagtgatgcactagaaaggattgcaagcctacatccctatccctaggtgatatagaacaagtcatgacacttggttccaagactagagccccaatatcccaattgtgaaccctagctctaagctcttacctagattgatcaggtctaagaaagagataaagagattcaagcaaagtgtaatgaaataacatagcataaaggaataataacattcaatccattccaaatgagatttacatagaatgtttgcctaactacaaaagaaactagccaaacctaacatggatggccttggtacaacaaaaagaagcatgcttgatgatatgtacaaggaagaaaaggaagggaagagggaagaaccctcttcccctcacacccaaacactaactcagctcccaagctctctttctcctcctttggtgatgattttcgtccaaaatgtccttcttcagtgctgaggcttcattatttatagagtagccagtgaaatctctgttttgccctcattatgcaaactctgcgacctgtggcgctcctggctcaggcacgccgctgacggcgccaacatccaaaagtgaaaaacaaatgaatacttaaaacaaccaagaggggggtgaattggttgaaaaactttacccaattaaaatttaaatcagagtagccacaggatctttatcacttattagaaattcttttgataccagaaatcaattttcaatcaactccccttttcaagaatgcagaaaacagagtatctcaaactgtgctttgaatatgattcacaaacaatgtaataagcatgtaaaactgaggaaattaaagaacacacagattttatactggttcacctcaaacactatgaggctacatccagttcttcactcaaaactagagagaagttccactattgcaaaatattctttacaagcaaaattacaaatctctctttgtcaaccctagacaaagttcagcaatctaaaacactattagatccttagagatacccctttcaacctgagaactctacccagttgaaaaacccagagaaacactatctctatgcttgaaagaaacccattacaatagagttacaagatttcactattacaaattaattgtaaaacccaatcactaagcaagaaaagatatcacctgataatccattgatgaatgaatatgaatgaatcacagatgagaacgcagattattacaccacagatatgcagcttttcttgactttgattgaaagtaaaaacttcaacacatgatcttcatgagtaattgattctatgaagcttctacaatgtttctttctcagaattttatcactaatgaaagcactgattgtttgtgaatgatcactcaacgaaaatctcaaaagcacttgttttttctcttcttcttattttctgtcgcagtgacttctatttataacagaatttttaccaaaaataattgattaaataagctcctgtaatcgattatttcgactatgtaatcgattaatccaagatggtaatcgattaaaatgcttatagctcgttcaagattccaagaacgaatagtttaatcgattaaaccgacacgtaatcgattaaaccagtaagttatgatttttctatttagaccaattaatcgattatgatttcctgtaatcgattaaaaccgaatgacagtttttaccaaaacatatgtgtaatcgattaaaatatttggtaattgattaaggcagtcagaacaacttttcaatgtttgcctttgtaatcgattaaattattgagtaatcgattataacgatcatgtctagttttcaaaaggcagttagaacaaaataatcgatgtcaccaacttggtaatcgattattcctgtgaaatattatttttccaaaaacttaaagcctttttttaacttttctacatgattttctttgattaatcccattaacctaataatcctatatgtatgaatgatgcatgttatgcactattggattatcagatcatacattttcttttacatgatcaatttgaacttttcaacttaaagcttccttttgcatgttgaaagcacaaaactctttactttgatcttcaatgatgcttggcttcatctgaatcaacaatctccccctttttgtcttttgacatgccaaattctcaaaatcttcaaattgattgaacatgcagtcctgtaatatgcagtcctgggaaattccttattcttcaattgattcaaataaacattttgtttcagatcatctttgatggagctttgcaagtacctgtacctttcaacattctttccagaaatcaagtgttaaaatattcaataatatttaaacattcaagtccagatttgatttcaaatttctccccctcaattatagtatataacattcaattcttataaacattaaattcttctagtaaaaatttaattgtcatttaattctccccctatctttttatttcagaatttttgttactccccctgaattattgcaatcttaagaagttttgatcttattctcttactcttattctattttgaattattcttattctattttgaattattcttattctattttgaagttttgatcttattctccccctatttggcttgttaaaagtcaaaaacactaataagcacaatgatcaaacagagaacagagaataaaaggtacaataatctattgataaagcaattacaaagagtaaaatagaaagagatcatacaaactctttatctgaattcataacaaatagaaagcagatcatacaaactttaaaacaaaatccaaatctagtgaatggtatatcagacaaaaactaaatctaaggtgtacttaggaagcatctaattctgttaggccctagatattagattcttttaatttgtctttactatcatgattctttagccaaagaaatcttcttgaagcaccagcatgatctcagccttgaaatccttttgaaaggatggcattccagacttcttctagattttcttatccttttgtaacaaggcttaggcattgtgtctgaatagaaaagatgacaaaggcagagatggctaatgatgcaaattcagaaggatttttatcctctatttataggctggattagactctataagtctctaaaacagtccaaattcaaaggtcacaactaatggtacgtgtttaagagccttgaattcagtttcactaataaatgaccagttatgaatttcataaaacgtgtcagaattcaagcaacagatcaaataatcgattattacgtagtgtaatcgattatttcagttcaatttagctttctgttcaaaaataacgtaatcgattaatattttcaggtaatcgattctttttatcaattatcagaggttgaagacaacctgtaatcgattctttttatacagtaatcgattattttaagtataatcatgaaaacagtgtatcagaactataagtaatcgattatcccgtgtggtaatcgattaacacagacagtttatatcaagtcatgtacaaggtaatcgattacagcttttcagtaatcgattattactgacttgtctgcttttgatttttgttctttaacaatagtaatcgattaattcaaagtgtaatcgattattccagagagttttatcttctgagaattagaagaataatcggttacctttgtttgtaatcgattacaaacttacaaaattcgttccagtatagggctttaaagtatttaatcgattaatacgcagtgtaatctattatctcagggcattttacaaaacagagcagtttagcagcttatttctcaatttactacataatggctatccatgatttatcaactcttcaaatagcacataagccacaaacaagataagctagttaagattattctcatcaagaattcctagcatatttcttagtgtatagaatctatctctagcaagtggttttgtgaaaatatcagctaattgattattagtatcaatgaagtctacctttatgttacctttttgaacttgatctctgagaaaatgatgccttatctcaatatgctttgtccttgaatgcatgactggattctttgatatattgatggcacttgtattgtcacatagcagtggtattgcattaagttccactccataatcttgcatttgttgcttgagccataaactctgtgcacagcaacttccagcagatatgtattcagcctcagcagtggataaagcaacacatgattgcttcttgcaatgccatgaaataagagagcttcctagcatgtgacatgtaccactagtgctttttctgtctaatttgcaacctgcaaaatcagagtcagaataaccaactatatttaaagaagcacctttaggataccaaagtccaactcttggtgtagctttgagatatttcaggatcctcttgacagcagtaagatgtgactccttgggattggattgatatcttgcacatagacacacacttaacataatatcaggtctgcttgctgtcaaatacaggagtgatcctatcattcctctatattttgactcatcaactttcattccatgctcatctgaatctagatatgttgatgtagccattggagttgcagcatctttacttttctccatttcaaactttttgataatttccagacaatactttgactgattaatgaatgttccattcttcatttgctttatttggagaccaagaaagaaggtaagttcacccatcattgacatctcgaattatttctgcatagctgatgaaaaatctttgcacaacagatgattagttgatccaaatattatatcatccacataaatttgaaccaataagaaatcatttccaagccttttgataaacaaggttttatcaatactgcccctagtaaaggattgttcaagtaaaaacttgcttaatctttcataccactgtctaggagcttgtttcaatccataaagtgcctttttcaatttataaacataatccggatgtttaaaatctttaaaacctggaggttgttcaacatagatttcctcctcaatatatccatttaaaaaagcacttttaacatccatttgaaaaagcttgaaatcaatgagacatgcatatgcaagtaacaacctgattgcttccaatcttgcaactggagcaaaagtttcctcatagtctatgccttcctcttgattatagcctttggctaccaatctggctttgtttctaactatgattccactttcatcaagtttatttctaaaaacccatttagtgccaatgggtttaagagatgatggtctaggaacaagttcccaaacttcatttctcttaaactgatttaactcatcatgcattgcatgcatccaatgttcatcacataaggcttgttcaatgttcttaggctcaatttgtgaaacgaaagccatatcacaacagagatttttaagtgaagatctagttgatactccctttgttacttcacctattatgttgttcattgataagtctcttgttgttctccattcttttctgatttgaactggagttgtggattcattttctgcttttggatcttcatttttgacagaggtatctttcatttctgttatttccagctgacctgcatcatcattttctttttcctccttagaggtgttagtctcatcacaaatcacatgaattgattcttcgacgcacattgttctcttgttgaacactctatatgccttactatgcaatgaatatcctaggaaaattgcttcatctgccttagcatcaaattttccaagtgattctttcccattgttcaacacaaagcacttgcagcaaaaaacttttaaatgagatacattaggctttcttcctttgtatagctcataaggagttttctttaaaatgggccttatgagagttctattcaaagtataacacacagtacttactgcatcagcccaaaaatacttagttaaattagattcattaagaagtgttctagctccttcctcaagagatctatttttcctctccacaacaccattttgttggggtgttcttggagctgaaaaattgtggttgattccattttcttcacagaatttttcaaaaagatcattttggaattgaccaccatggtcacttcttattgaaactattttactacctttctcattttgagtaagtttggccaattttcgaaaagcaaggaaagcatcacttttggatttcaaaaacatagtccaggtatatctagagtaatcatctacaatcacaagtccataatagtttcctcctaaactcatagttcttgaaggaccaaataaatccatgtgaagtagttcaagaggtctagaggtggaaacaatgtttttgctttgaaaagaatttttagtttgtttccccttttgacaagcatcacagattttatccttctcaaacttgagtttgggtaaaccaatgactaattcttttcttatgagcttgttcatgtgatgcatgttcatgtgacttgctcttctatgccacaaccaagtttcatccaatttgctgataagacttgaagatttatggaataatgcatgatcaattgaaagcacataaatgttaccttttcttttacctatgtgcagtacctcactgtctttatcatctgatattatgcagctatctttgttaaaatttaccttgtagcctttatcacaaagctgactaatgctcaacagattatgctttagcccatccacgtacaacacactttttatcttggtttttatgttgtctcctatatttccttcaccaataattttgcctttgttgttatcaccataagtaacatatcctccttcttttaatgtcagatttgagagaagggacatgtctccagtcatgtgtctagagcatccactgtcaagataccaaattgatgttctagctcttagacacacctgcaaaagcaaatcaaaattttattgaaggtacccaatcaaggttgggtccgtatgggttagcatttcttttgatcttaggaatccagatgcaatcaccattaggcacaaagaatctcctagcatagcatttaaaagaagtgtgtcccttcttcatacaatagttgcaagtgacagattttgaagatttttcaaatgcagcaaatttattgacccttgagttcttatgccacttttgattcttctgttttggtggtacaaaaactgttttcccaaatgattttgttccacgtttgtaccccaatccagaagtatctccagcatacttttgcacacttaacatttcagctaagttgcatttgcctttataaaacttcctcaagagatcaatcaagtcactatttttggctaaaagcaacatatatttttcaccttgactttgtttgtattcttcaaaatctttcaaaagcattttatacttgtcaacattggttgatgaagaagcacacacacagccatttaatttttaacttgaaatcagtttttcattttcttctttcaagttgcaaatttcattttgcaaatctgtaagtttttctatatgccatctaagatttactttgagcttattattggcttttgcaagtttttgggcttcctcatacatctcttgaaaagcatgaatggcttgatcaagttcagaattcacctcatcttcttcactgagcagatcatcatcatcttcatttatgatggatgtaaaacacaagttagcttcctcttgctctactgaagaatctgaagtggttgactcattatcttcccaagctatgtaggctttctttcctttagcttctttctttgcctttccttctgcttgttgcttcctcaagtaaattgcacattcagacttgatgtggccaggtttgccacactcaaaacaagtaaaattgttgctgctgtttctgttgcctctgctgaatcgtttattcttgcctttcttcagaaatttgttgaattttttaacaatcaagttcacttgctcatcatcttcctcttcttcacttaattcttcctctttttcgattttgcttgctgcagccttcagtgctatgcttcttgttttcttctctgcatcttcacaaaatgttagttgtgacatttctaattcatattcaagaagcttaccaaacaaagctgccatggacatcttagataggtccttcgactccttgatggctgtcacctttggctgccatggtcttgttaagcacttcaaaattttgatgtttagctcctcagtatcaaatactttgccaagacccagcaagtgatttactatatgtgtaaatctggtttgcttgaattctgacgcgttttatgaaattcataactggtcatttattagtgaaactgaattcaaggctcttaaacacgtaccatcagttgtgacctttgaatttggactgttttagagacttatagagtctaatccagcctataaatagaggataaaaagccttctgagtttgcatcactagccatctctgcctttgtcatcttttttattcagacacaatgcctaagccttgttacaaaaggataagaaaatctagaagaagtctggaattccatcctttcaaaaggatttcaaggctgagatcatgctggtgcttcaagaagatttctttggctaaagaatcatgatagtaaagacaaattaaaagaatctaatatctagggcctaacagaattagatgcttcctaagtacaccttagatttagtttttgtctgatataccattcactagatttggattttgttttaaagtttgtatgatctgctttctatttgttatgaattcagataaagagtttgtatgaactctttctattttactctctgtaattgctttatcaatggattattgtaccttttattctctgttctctgtttgatcattgtgcttattagtgtttttgacttttaacaagccaaatagggggagaataagatcaaaacttcaaaatagaataagaataattcaaaatagaataagagtaagagaataagatcaaaacttcataagataagattgcaataattcagtgggagtaacaaaaattctgaaataaaaagatagggggagaattaaatgacaattaaatttttactagaagaatttaatgtttataagaattgaatgttatacactataattgagggggagaaatttgaaatcaaatctggacttgaatgtttaaatattattgaatattttaacacttgatttctggaaagaatgttgaaaggtacaggtacttgcaaagctccatcaaagatgatctgaaacaaaatgtttatttgaatcaattgaagaataaggaatttcccaggactgcatattacaggactgcatgttcaatcaatttgaagattttgagaatttggcatgtcaaaagagaaaaagggggagattgttgagtcagatggcgctcctggcgccaacacggtgctgatggcgtggggtggagaaaccgtggcgctgatggcgcggtcctggcgctgatggcaccaagttccagaggttgcggcgctcctagcgcgagactggcgttgatggcgccaggttccagagcttgcggcgctggtcgcgcggacttgacgctgatggcgccagaccttctgctctgcataattccttagctaattcacctgctaatcattcaatcttgaccaaaatacctcattgaagcatatgagtcacattcataccaattggaagctatttatcatataaaatgatgtatttaatgattcaattaagcttggaaacatcatgtgctagacacatatcatcttcccagcagatttttacattttggatatggagaatgagtcttctagccatggtcccacattcatcctagggagaccattcttgatgacagcaaggactaaaattgacgtgcatgcaagaactgtttctatggagtttggtgatgacattgttcagttcaacattttcgaggctatgagacatcctgcagaggagcattctatttttctccttgatatcattgatgctgcagtagatagtgtagatatttctaatttactttctgatttttttgatctttcttctgacttttctaactttgatcttggttcttgtaattgtacctgtgatgattctgctcctgtgtgtaatatttgtgtggaaatttcctccgcacttcactctgattgtgttccaggtacagatacaagttctgagcctactatcccattttcctcaacttctagtcttcccttaccttccactattcagcccctttccttggagctgaagtcactacctgagtgatcgaaggtcgtactccgtcaaattaatatgaattaaatgtagtactaggaaagtgactcctaggtcgtctctcaaggatcaattgtcgatgtttaaggattgaaaacgtgttggggggttgttgtggcagaatgcgaaattctaaaaatagaatcgaaaactaaattaaacaaaaacacgaaattaattgcagatgattaaaaacaggtcaaccttagaacagattgcgcctctaatatcctcggttcacaaaagataaattattctgactcaatccccaatagtccagatcaatcgactaagcgaagattaatctaaaacgtcctttcacgaattaagcaaacgtgaacctcgttagggcgagtttctcagaattaagcaaactgagattactgaattaatcaacctcagaatcattaagcatgatcccaattcgaaaaagacagaacagaaacccagcgaagaagaatcaagcagaaaacgaaattcaagcggagaacctccattaaagggttgcaatctgtcctagggttaaaccctaggatttagccttccattaaattgaaattaacaacataaacgtaaattgaaaccaaactgaacattaaatgaatttaattgcaaaagtaacgaaattaaacagtaaagaaattaaaagcataaaacaaaatttaaattagaagatgaaacagaacgaaattactgaaattgaaaacgcaatgtaatctggatagaaaaacgaaataagtaataagcagagaacgaaaacagcttctgaaatagaaaacgaaaataaaataaaaacctaaaaccgagttacagcggaaaacgaaaaatagaaagatcaagaagaagcagaaaacgaaattaacctaaaacctaaaaacgaaaatggtctgtagaatgtagagtgtgtagagtctcccctttttttgtgacggcataagctaaatatatagaaactgctaacctagacgaatgggctaaccctaacaattttggcccagaaaataactaaaataataaaaacgaaattaattaaaaacgaaattaaatctggcgtggcgctaatcttcagtccataaattaactccaagcccaattaattgttaaactgccctgaaaataaaaattagaataattaaacttaaaataatccaaattaattaaaatctgaattatcggtctaattaaatcctaaatgagaaacaatgcaagatatagacatttaaatacaattagggattaaaatgagtacagaaagatgagtaaatagtaataaatagtgactcatcaaaaccccccatacttagccttttgcactcctgggcaaaatcaaaaagtagagtagagcaaggaaaaattctaaagacattaaagaaagtgacaccataaaataaataatttcacacaatcctcaatgaaaactgggaaaagagaaagtaatttacaatttccaacgtataaagagtcagagaaactacacacttatgaaattcatccaagtattcaaaacttatcaaaacaatcaatccgctcaagaggttaattaaaagcaacagaacctcactagatgcactgtatcacacactgtatctctcaagtgtttagtcaagtgtatactctcaaaacactcatgaaaacaagcaacagatagacttggcaagcctctataatcaacacccaataaacatgcatataaggatcaaaaggtcttttcagggttgtaatgtggccaaggacatgggtaggataaaatatgggataagtagctgcaaaccagagggactagaggagcaatggggaataagtaagaagtaagcataaaaacaaacccaataatctctaatcatcctctaacaccattccttttcctttgcttcaaacacaacagcttttcttcaatttattatatttttgttcttttctttcatttctattttttttctttttttcttttttttttttttttatgattgatatatgcatagaaacatgaagaataagctggtcataagagtaacccaacatcagagtaaaccaacaggccagagatatcatccaaaacaatatattcatgcacccccttacttattcccaaaacaattccaaagctccaaaattccctaaggttaaggtaatcaattgtttttcacttaaggcttgtaatgagcttcaaacaaaagaaaggaaataaggctcaacagggctatcaaaggaattaaattcaaggtaagcttatttggccagaggtttatcagaacaattgtgccttaatcatatccaaacatgcatgagaatcaagaaatatcaaacagagtcaagacaaggcaactgtgcaagcaatcaagaggtatagcacacatgaaagaacagttattggctcaaatcctcacacagggtatatatctgtcacagttaaatcaacctttcaaacttcataatcatctttccaagtaaagaaacatggatttcaagtcatacagtatgaagcaaatcttatctaagagtgaagtaaatgtcaacaactattcaaacccagaaatcaaaaagaaacatgcaaaactgttcgcaaaaataagactcaaaatttaaaaactaacagaacaaaacaaaacaaaactaacaaaccaaaaataacagtctctcccccccacacttaaaattacacattgtcctcaatgtgacacaaataaaagttcagaataaccagaataatgcaataaatatggacaaatgcgataaaaataaaggagaagaaagaaaagaaagttctaaagttaagtggaaggttgaatggagataaggtcaatcagagatatttcttccacaactgtatccaacaaagaaggtttgctgaagaatggcttaaggcggtgtccattggtcttgaagctctttcctgtggactcactttggatttcaactgtaccataaggataaacattagtaacaacaaagggtccaatccactttgatcgtaacttaccaccacccatgagtccgagcctagaattgtacaagagaactttctggccaacctcgaagtttttcctagctatcaggctatcatgaaacttcttggtcttctctttgtagaactttgagttctcataagcttcaaggcggatctcatctagttcgcttagctgtagcttcctttcctcaccagcttgatccatggaaaaattgcaagtcttcacagcccaatatgctcgatgctcaatctcaacaggcagatgacatgccttgccaaagacaactcggtaaggagacattcctatgggcgctttgtaggcagtcctatgtgcccaaagagcatcgtccagtcttatactccaatcttttctgttgggctggacaattttctctaagatcttcttaatttctcgatttgaaatttcagcttgcccattggtttgggggtgatatggtgtagagattcgatgcacaaccccgtatttcttgagcaaagcttgcatggatctgttgcaaaaatgggttccttgatcactaaggatggctctgggtattccaaacctgcaaaatatgttagatcgaacaaaatctaccacaacccgagcatcattagtcctagtagctttagcttctacccattttcaaacagccaataagatgtatgaaaaaccaaaagaaacaggaaaaggtcccatgaaatcaataccccagacatcaaacacctcacagaatagcatgggttgttgaggcatctgttgtctcattgtaagggatcctcctgctctctgacactgctcacaagtgctataggtcttcgccgcatctctgaagatggtaggccagtataaaccacaatccagaaccttgcgagctatcctctgtataccgagatggccacctggtgcagatgaatgacaaaactgcaagaccgaatcaatttcatgatctggtatgcatctcctaattatctggtcactgcacaacttccacaaataggggtcatcccaaatataatgcttagcatcactcttaattttatccttttgagctcgtgatgccaagggaggaaaaacagaagcaactaaataatttacaatattagcaaaccaaggggtgggattaaaaatagaagaaacaattaaaagattttcatcaggaaaattatcctggataggcaacacattagcattatcctcagctccttcaattctgctgagatggtctgctaccaaattctgagctccactccggtcacggatatccaaatcgaattcttggagtaatagcatccatctggtcaatctaggctttgagtctgtctttttcagcaagtactttagagctgcacggtcagtataaacaataacatgagaaccaagcaaatatgatctaaatttatcaagagcaaacacaatagcaagcaactctttctcagtggtagtgtaatttgcttgggcagcatccaaagtcctggaagcatagtatatcactctaggcagcttgtcaaccttttgtgccaagacagctcccaatgcatagttggatgcatcacacattaattcaaatgggactgtccagtcaggtgcctggaggataggagtagtagtcaatgcttccttgaggtgatcaaatgccttcttacagctatcatcaaaattgaagtccacatctttttgcagcagattagatagcggaagggctttcttgctgaaatctctgataaagcgcctgtagaaacctgcatggccaaggaaggaacgaacctctcgcttgcaagaggggtaaggcaaatgtgaaataacagatatttttgcaggatctacctctatgcctttactagaaatgacatgccctaaaactattccttgttctaccatgaaatggcatttctcaaaattcaagacaaggttagtttcaatgcatctattcagcactttatctagactgtctaaacatatgtcaaaagaagatccatacacggtgaaatcgtccataaacacctctatgcaattctcaagaaaatcagaaaatatgctcagcatgcaccgctggaaggtaccaggggcattacataggccaaaaggcatcctcctataggcaaaagtgccaaaggggcaggtgaatgtggtcttctcctgatcctcaggagtaatatggatttggaaatagccagaaaaaccatcgaggaagcaatagtgagatttacctgccagacgctcaaacatctggtcaatgaatggcagcggaaaatgatctttccgtgttgcttggttcagccttcggtaatcaatgcagaccctccaactgttttgcactctggtcggaataagctcatccttttcatttttcacaacagtgaggcctgtcttctttggaactacctggactggactcacccactgactgtcagagatagggtaaatgatcccagcttgaagaagcttggtcacctcctttttcactacatccagaatcaccgggttaagtctcctttgcggttgtctcacgggtttagctccatcctccaatgatattctatgcatgcaagtggatgggctaataccggatatatctgccagggtccagccgatggctttcttatgctttttcagaacttgcaacaacttttcctcttgatcagcatcaagggaagtggaaatgatcactggtaacctctcatcattatccaagtaggcatacttgaggttttccggtaaaggttttaattctagaacgggggtgggctgatcagaagaaggaaccaaagatggaagaagaatgggttccacagcctgtacctcaacttgcaagtcagattcttgtataacatgtttagtgcattctgactctaagaagttattatccaggtgtacatcatcacccaatacatcagaatcaattccagaatagacatcaaaattattggacatatgttcagattgaaaatcagaactagattcattatcagattcatgttcagattcagattccatgcatgcaagagaattgtataggttggatagaaaacactgtttcgtatgattggaagaataaaaatcggaaacatattcatcaaccacatcatcaagaatctcagcacggaaaacagaatgattttcagatggatgtttcatggcatccagaatattaaagtggacaacgatatcaccaaattccattgttaaagtaccagcatgtacatctatcttagttcgggctgttttcataaatggtctacctaaaatgagggggacagaaccatgggagaatccctcctccatatcaagcacatagaaatcagctggaaaaattaattcaccaaccctaactaagacatcctcaataaaaccaataggatatgcaacactcctatttgccaactgtatcactacaccagttggttgcaaagggccaagagacatagaattgaaaatggacagaggcataacatttatggaggcacccaaatcaagcatagctctatcaaatttattactaccaataatacatggtatgctaaaagtacctgggtcctcacatttttcaggcatatttggaacagaattacctgtcatggaagaaacatttctgcccatgctgactctctcaattccagtcatcttcctcttcctcttgttggtgcacagctccttcaagaattttgcatatttaggaatatgcttgatggcatcaagcagaggtatgttgacctctaccttcttgaagatctccaatatctccttatccacctcttccatctttttgtttgaaattgatctaggaggaaatggaagagggatgggagtctgctgctgcacatcagaactagtgctggaagaagaagaaggttcatctacatgaatttttcgagtaccaattgaatcatcatcatttcgctcatgtactggtacaggtgcaggtgcaggtgtaggtataggaattggtatggatggaggtggggacagtgcagcaggtatatcaatctgttttcccgacctcaatgtgatggcactcacatttttcggattctgcacagtctgagagggaagtctatctgaattttgcgactgtgcctgattgagttgagtggccatctgccccatctgattggtcaaactctggatggaagctctggtctcttgctggaattgcaagttttgcaaagtcatttgtctcaccagctcttctaatgaaggttcagaagtggaaggttgaggtgctggtggtacaggaacatcttgttgttgcctctggtactgctgctggactggtggaggcacgtatggtctagttggaccagcagagccttgaaatggtggtagtggaggttgctgctgatgctgagtattagaccatctaagatttggatgatttctccaccctgggttatatctgttactggacagatcataattctgctgctgttgaggtctattgttatagatatttgcagaataagcttgtggagcatcagggcctacaggttgctacagagaaggacatgcatcagtataatggtcactagaagtgcagacaccacaaactctggcaactgaagcagacttctggttaacagcaagctgagtcactaaattgactaaggcgtccaacttgccctctaatttcgtggctgcagatgaagaagaattaacagccacatcatggactccacgaatcacgacagcatcatttcttgcactgaattgctgggaattagaagccattttctctatcaaatgcctggcttctgcaggagtcatatcaccaagtgccccaccactggcagcatcaatcatactcctctccatactgttaagtccttcataaaattattggagaagaagctgctcagaaatctggtggtgtgggcaacttgcacataactttttaaatctctcccagtattcatataaactttccccaccaagctgcctaattccagaaatatctttcctaatggcagtggtcctagatgctggaaaaaatttctccagaaacattttctttaggtcatcccaaccagtgatagacctaggagcaaggtagtataaccagtcctttgccactccctccaatgaatgtgggaatgcctttaagaaaatgtggtcttcagggacatcggggggtttcatagttgaacagacaatatggaattccttcagatgtttatgaggacactctcctgcgtgaccatgaaacttgggcagcaagtgaatcagtcccgttttgagaacatacgggacatcctcatcaggatactggatgcacaaactcgcataagtgaaatcaggtgcagccagctccctaagagtcctctcacgaggtggaggttgagccatattaatctcaggattaatataatcaacagaattggaatcagaaatattatgaacaggatgctcagaaacaggatgctcagattgcagggtaatattatctaaaggtacagaatctaatgaaatattcctagaatgtctagctaatctatggtaagtcctatctatttcaggatccaagggttgaaggtctcctggattgcttctagtcatgcactacgtgcaacatattaagcatttgatagacaaacataaggaggggtaaaactatagctacactcaaacgaagtcgaaatgagctaaatttttgtgagagataccctaaaatcatgaaaagatagcatacaaaaattcaagacctaattctacggataactaattaaaacagattaaacaaatatggaaaaataagaaaataaaacttcaaaaataaaaataaaatagaaaacagcctctttttgaagatccgacggtggccagcaagcatggcttgctggggtgggtagatctcttttttctaccccaaaaacatatataatacttcaaattctgacggtcggattgaaagttatgaccgtttaaagttttgacaaaaaatttaatctcaaattttcgtatctcagaatctgtagtactttaaatgtttttggtatttttcctaacaatataagctaaaagaagttaccacaaaaaaattcacgaaaaaataacaagtaaaactatcaaaacgaaaaatcgcaattaattcaaaaattaggttactattcacgctaacactatgtgacttgcgactgctgcggcttctggatgcgctacttgtttaccctaattgcggctgcgacttgcttccttgtggatatgcaagaaacaaaaatttgaaacacaagtcgataagataacaaccaatataacaaaccacaattcaaaataccaattttttttttttttaggtctaacaaaccacaattaagataataactgataagataataattgataagatgataacttgaaataattaagataacaacaggtacaagtcgaattttttttttttttttaaatactaacagaacacacactaaaacaaaaacaaaacaaaacaaaaacaagtttcgaatttttattttttatctttttttattttttattatttttttttaacgcacacacacaaaaataaaaacacacgcacacaaaaacaaaacccttaaacagaactgatgatccccggcaacggcgccaaaatttgatcgaaggtcgtactccatcaaattaatatgaattaaatgtagtactaggaaagtgactcctaggtcgtctctcaaggatcaattgccgatgtttaaggattgaaaacgtgttggggggttgttgtggcagaatgcgaaattctaaaaacagaatcgaaaactaaattaaacaaaaacacgaaattaattgcagatgattaaaaacaggtcaaccttagaacagattgcgcctctaatatcctcggttcacaaaagataaattattctgactcaatccccaatagtccagatcaatcgactaagcgaagattaatctaaaacgtcctttcacgaattaagcaaacgtgaacctcgttagggcgagtttctcagaattaagcaaactgagattactgaattaatcaacctcagaatcattaagcatgatcccaattcgaaaaagacagaacagaaacccagcgaagaagaatcaagcagaaaacgaaattcaagcggagaacctccattaaagggttgcaatctgtcctagggttaaaccctaggatttagccttccattaaattgaaattaacaacataaacgtaaattgaaagcaaactgaacattaaatgaatttaattgcaaaagtaacgaaattaaacagtaacgaaattaaaagcataaaacgaaatttaaattagaagatgaaacagaacgaaattactgaaattgaaaacgcaatgtaatctggatagaaaaacgaaataagtaataagcagagaacgaaaacagcttctgaaatagaaaacgaaaataaaataaaaacctaaaatcgagttacagcggaaaacgaaaaatagaaagatcaagaagaagcagaaaacgaaattaacctaaaacctaaaacctaaaaacgaaaatggtctgtagaatgtagagtgtgtagagtctcccctttttttgtgacggcataagctaaatatatagaaactgctaacctagacgaatgggctaaccctaacaattttggcccagaaaataactaaaataataaaaacgaaattaattaaaaacgaaattaaatctggcgtggcgctaatcttcagtccataaattaactccaagcccaattaattgttaaactgtcctgaaaataaaaattagaataattaaacttaaaataatccaaattaattaaaatctgaattatcggtctaattaaatcctaaatgagaaacagtgcaagatatagacatttaaatacaattagggattaaaatgagtacagaaagatgagtaaatagtaataaatagtgactcatcactgagcacctcaagtatgcatatttagatgatgctcagaagctcccagtcatcatatctagtagtctgccactggagcatgaagaaaagttgatgcatgtcttgagaggccacaaaaaggccattggatggacacttgctgatcttcctggaattaatccttccatctgcatgcatcggatacttttggaggatgattctagaccagtgaggcaaccccagaggcggctgaatcccactattcttgatgtggtgaagaaggaagtgacgaagctactagctgcagggatcatctatcccatctctgatagcacttgggtttcacctgtccaagtggttcttaagaagtcgggtctgacagttgtgaaaaatcaagataatgagctgattctgactagagtggccaacaattggcgagtttgcgttgattacaggagactcaatcaggccactcgcaaggaccatttccctcttcctttcattgatcaagttttagagaggttggcaggtaaatcacactactgctttcttgatggtttttctggttacatgcaaatccacattgcaccagaggatcaacataagaccacattcacttgtccatttggcacatttgcttacacccggatgccttttggcctatgcaatgcacctgataccttccaaaagtgcatggtaagcatcttttctgatttattagagagttgcatagaggtgtttatggatgatttcactgttaatggttcctcttttgatgcatgtttggatagtctctctagagtgctttgttgatttcaattgaagacaagcatcaatgaacaagattcaagcttcaaggagttttgagctttcaacatgaccaaaggctaaagaatcatgggaagctttgaagaactaatttgattaattgtaaaagggagttatgatctgataatccaagtgtgcatttcatgtcattcattattcatacaactaggattgttagattacatgaattgatcaaaggcagcacagaaaaggttaagaattttaggaaaaaccaagatttactgaagtaatcgattacatacttattggaatcgattattttgttcttcgtgcctttgaaaaacaaatcaagaacaaggtaatcgattacagatagaattaatcgattacttaggctaaaacatgaaaaatgcatcattcggtcttaatcgattacaacatttggtaatcgattacaagcctgccttgaaaaagcctaacctactggggtaatcgattacatagttcaaatcagaaaatagggtcactttggcttaatcgattacaacaattggtaatcgattacatagtacattttagagaaacaggtcactctggcttaatcgattacgttcggaataatcgattatttagttcataagccaaaattcagaaagcctcaggaatattttaatcgattacatcttgagttaatcgattacaaatggtaaataatcgattacaggagcgtgtttaatcgattagtatcagtaaaaatctgttataaaaagggcctctcagactgaggttcatagctttcacaattattgagttttacgaatcctaaggcattcatacacgctctgagctttcattagtaaatttttctctgttctaaacacattgacttcaccaaatccatatgggttgttgaatcaagaaggtgaagtctcatcattcattcaaggcataaggaaaggtttgcatatgtttttgtgatcagtcaatcatcctgagtttcattcactttgcattcattcttggattattaggtgatatctttccttgtcctttgttgatgtaacctgttctttgaattctttcaagtttttgtttattgtaaaatggatttcttgcaagtgtagagatagtgtttctctagtttttgctgagtagggttcttggaaaagggtttggtctctaagagtctaatagggttttagacttctgaactttatctaggattgataaagagagacttgtataattgcttgtaagaatattttgcaatagtggaactctactctagtgttgagtagaagaaactggatgtagcatcataggttttaaggtgaaccattataaatcatttgtcttaatttatttttaacattttcggttatcctaggaattaattctgctgtgtgaatttgtctggatggtgtttcaagtcttggattgatcattggataaagtttgttcaagtgtttttgtgataaagatccaaagggccataaactctgatttgttttgaaaactctatttttcagtgagaaaattttattttaccaagactaaccaattcaccccccctcttagttaattgagaagtgttccttattttccacatgcttgaccgatgtattagtaccaaccttgttcttaactttgagaaatgtaatttcatggtgcatgagggtatagtcccaggacatttggtctctagtagaggtattgaggtcgataaggccaaaattgaggtgattacctctttgccttaccccgcttctgtgcgggaagtacgttccttccttagacatgcaggtttttataggagattcattcaggattttagtaaaattgcattaccattgtctaagcttctccaaaaggacgtagactttacatctgaccaaccttgcaaagaggcatttgagggattgaggaggaagctgactacctctcccatcatgcagccgccaaattgggagcttccctttgagctcatgtgtgatgcctctaattatgcacttggggctgtgttgtcccaaagagttggtaaactatcccatgtcattgcttatgcttcacgcactttggatgcagcccaagttaactacaccaccactgagaaggagctcttggctattgtttttgctttagataaatttagatcctacttgctttgctcccatatcactgtctttattgaccatgcagctttgaaatacctgttgaagaagcctgatgctaaacctagattgatcaggtggatgcttcttattcaggaatttgacattgagattaaggacagaagtggtgcataaaacttggttgctgatcacttgagcaggattgaaggacctcttgagtcctttcccattcgtgataattttcctgatgagcacttgatgcatttgcattcattgcatgtcacaccttggtttgctgactgatcgcagccgtacgcaaccaaattaaattgatttgaatgtagtactaggaagttgactcctaggtcgtctctcaaggatcaattgtcaatgtttaaggattgaaaacgtgttttgggggattgttgtggcagaatgcgaaaatctaaaaacagaatcgaaaactaaattaaacaaaaacacgaaattaattgcagatgattaaaaacgagttaaaccttagagcagattgcgcctctaatatccttgattcacgaaagatgatctgttccacttaattcttatcagtccaggttaatcaactaagcgaagattaacctaaaacgtcaattcacgaattaagcaaacgtgaatctcgttaaggcaatttctcagaattaagcaaactgagattaacaactcagaatcattaagcatgaaacgaattgcatacagaaccctaacaagaacaaatcaagcagaaccgaaattcaacacagaaacctccattaaaggtctgcaatctgcttagggttcaactctagggtttagccttccattaaattgaaattaacagcagaaacgaattgtgcattgaaactgaacatatcgaaaccttaaatagcagtaaacgaaaatgaaacagaaaacgaaattcaactcaacagaaaacgaaaatgaaaatagatgaagcagaatagaattcgaaaagaatagatagaacagaaaacgaaaattgcttctaaatataaaatctcaacgaaagtagaaacagcaggaaacgaaaaattagaaaaataaagaagaaagcagaaaacgaaaataaacctaaaaacgaaaatggtctgtagaatgtagagtgtctaatcgagtgtgtagagtctcctctctctccgacttctgacggcataagctaaatatatagaaactgcctaacctagacgaatgggctaaccctaacaattttggcccagaaaattactaaaataataaaaaacgaaattaattaaaactgatgttaacgtggcgctaatcttcagtccataaataagttccaagctcaattaattgttaaactgccctgaaaataaaaattagaataattaaacttaaaataatccaaattaattaaaatccgaattatcggtctaattaaatcccaaatgagaaacaatgcaaaatatagatatttaaacacaactagggattaaaatgagtatataaagatgagtaaatagtaataaatagtgactcatcactgacattgttaatttccttgttgcatctgttgttccacctcatgcatctaggtcccaaatagctaaacttatttttgaaactctggctattttttgttttttgttttctgtctatttatgttttgttgctatctgtttgtcagtgtctgttgttttctattttctgtctatctgtctgtatatattctgtttgtctgttttagtttttgagtttgtatgtttttgttgtctgtctgtttctgttttgttgctgtttttattgaatttaggcattttttcatgtttttcataggatttctaatttgcataaattgtgagaaatgttaaaaagttggttggattgagaggtttcatacttgatgtgaatcattgtttcaattgttgaagtgataagcaggcttgagaaatagaatttaagatgaaccatgtgtggtagaattatgccttgtgagtttatgagcctttgtgaatatgttctttcatgtgtgatttcacccttgtgctagattactctatgttttgccttgcctcttttgacattctttgttgcacatgctttgattgagatgatttaggccttctttcttttagctactagccaaataagcctatccttgtgttgatatccattgtcaccctctttgagcctttagccttttctttcttgtttagctcattaaaaactaaaaaaaatgatggaaaatcatgttaccctagctttagggagaaaaagggctttggaattgttttgggaatgggtttcaaacaagtgcggggtgtttgtcttttgttttgttttgaaagaaaagaaaagaaaaagagaaaagaaagagttcaaatagcaaaagttcaaagaaaagaagaaaaagtagagaaaaaaattgtgtataagcaaagaaaaagaagttcaagaaaagaaaaaaaatatatcttgttggcttgctccccattgtccctcttttctcttaagctttagcctaaatatccttttcttatccacctttccctaagccattcattacaagctaataaagtccttttgatcttttgatgcatgtgtatttcaagttgaatgaatgagaggtttgtcaatgcttggatgtgctaattgcatgtggtgtttgagtgtaaatacaagctgtaacgccccatctaaaacagggggtcattaccctgccttaattactatcattaatgataatcatcagagttaaagcagttcggaagcataagaataagaatgacatctccaaatgtcatcaacatagccactatacaatatgatatggtgaatatacatgaaatatatgtgtcttatacaaaactgtacatacatctcccctcagggtacaaaataaaaaccaaaggcgaatacaaaacatctgagccacatgctcacatcatctagcctaaggtttgcaaatcacagctatccctgcataggcttcttgcctttggatctgtctgctcctcctgaggattcacctgcaaaacataagccccatacacggggtgagatataaaatctcagtaaactcagggcccttgaaggtatttccttcccctggttcacttcccaacatacgcatgaaatagtatatccaaaccatctactcatgagatttcatcatcagaatatcattctcacaatcatcaatcaatcagaaacctcatctcacatccacccgtcaatactcaggtgtcccaagcacggcctacaaccgttcatcacatgaatcaccaacctgcagaggctacatctgagtatataggaacatctccacaccaggaggctatatctatataacaggaacatctcatgccaggttctcaatcatctgtatgaggctacatctatatatataggaacatctccactctaggaggctgcatctatataacaggaacatctcatactagcatctccactatctatatgaggctacatctgtatatataggaacatctccaatctaggaggctacatctatataacaggaacatctcatattctatctcaacacaattgcctgaggaggctacatctgtgcatatagggacatctccattcgggaagctacgtctatatcatagggacatctcacaacaggtcttactcaatctctagtcatctatcctactaccataggattatattcattcgttctcagagctcacaatcagtctaatagacaatcacgcctatcacaggcggattaactcataatcatacaattcaatctcccatcacagtgttcacattcatttccaatagttcattaaacatatcataagccagaccactcataactatgggcataagtctcacatcacaggattcagattgcatctcaagcatctaaggtcaatacatatcatttcccccttcacagggttcaagtcacatgttcagcacatcaagtcaatatacatcaaatcccatcacagggtacaacacacaatccagtagtcaatcatattcacatccatgtttcacatacatacaatcattcacattcaaaccattcctccatttggagcatggtgaaacacagcaaggacatacaaacaagaaccgagagcttaccttctctaagcaaaataccggcttccccgatctcgtggctaccaccaccagagatatcaagttcacgtcctacataagcaaacacatagcatataagcgacggtcctaagccgttagcacaaaaggaactacaattccctttctacagaacacatgactaatcacttcacaagtgattctcagatcctcactaggacccctctcagcctaaccaaggctccagagcctctcctaagactccgttcaggctaacataagcatatgcacaccttagcctcatcataaccaagctcagatcacaattcatatcagctcataaacaacatctataccatcccatgagcaactttatcatctactctagggttcacaataaccacacattcagccctttctctatacatgcatagctcagagctaaaatcaaacttcgtcaataatgatttctgaaggctctaacatcatcacaacaaccccctgaacataaaactctacaggaccctgggctaattccaaccccatcacatatgggtcactgttcatgcaaaccccccaaactcacaatcaaacggagaaacttgagtttcttacctcaatggcaacaaagaagacccaaggaccacctccccgagctctggtgtcctttccacgcagtgggtctcagccactctcaagttctctgagctttattccaaaattcactcaaaaggggtttttgaagagaaaggatgagtgattcaagcttccaaggtgtttctctcacaagaataagccataaggaagtgttttggtcaagatatatggctctaggaagcttggggatgtcaacaatggaggtctagggcagaaggaagaagaagaagccttttcccctttaattttcgcgttttgggctttaaatagtggctctgcccgacctgtggcgctcttagcgccagcctggcgcccccagcgccacactccagaaactccggcgccatccgtgccacatctggcgccatccgcaccaactgggaaacttggcgcccctggcgccacattcccgaatctctggcgccaccagcgccacattccaaaatctctggcgcccccagcgccgcatctggcgccatccgcgccagttggaaaacttggcgcccctggcgtgaacctccagagctcccgcgccacttcctagagaccatggcgccttcagcgtgaacctgacgcccctctggcgccatcagcgccagacctggtgccatcagcgccgcaacccttacaaggttttctactaaatgcacctttctgggtaactaaagcatgattatagccttaatcacagggtttaaagttcaaggtcttacattacacccctcctttttaagaattttgtccgcaaaattaagatcattcctggcacataactcgggatacacttgtaacatctcctgttctcgttcccaagtcgcttcctcaggtgatcttccttcccactgaaccttgataataggaatggtcttactcctgatcttcttctctgtgcgatccaaaatcttcactggtcgcgtagggcaagtcagattctctttgatctgaacagtgttaggctccaccacgtgtgaaggatctgatacataccttcgaagctgcgatgcgtcacatcatgtaatcctgacaactgaggagcaaagctagcctataagccatggtcatactttctgaagtatctggtaaggaccaatgaacctagggctaagcttcctcacacccaacgtgtaacgccccattcaatcattagggtcattaccagacattaatcaacaaacacacatataatcatcagagtttaagcagtttggaagcataaactaaaagtgacgtcatcaaaggtcactatcataaacactgtacattataatatggtgaatatacatagaatctgtgtttaagtacaaaactgtacaaataaaatttcccctcagggtacaaaacaaaaccaaaggaaaaaacaaaacatcagagccacatgctcaagtcatctatgcctaaggtttcaacacacagctatccctgcacaggcttcttgccttgggatctatcagctcctcctgaggaatcacctacaaaacataagccccacaccaggggtgagatataaaatcctagtaaactcagggcccttaaaggtatttccttcccctggttcacttttatacatatacatgaaaatagtatatcaaaacaatcataccaacatcagtgaatcactcactcaatcatcatacaccatcagggcacatctacctgaccacaatcaggccatactcatggcatacaaccatcatcatacccaacactatcctgcagaggctacatctatgtatataggaacatctccgcccagggaggctacatctatatactaggaacatctcatggcaggatctcaatacatctatcagaggctacatccgtatatataggaacatctccgcttggaggctacatctatataacgggaacatctctttataatgaggctacatctgcagatataggaacatctccaaccaggaggctacatctatattgcaggaacatctcataacccatttcaatacaattgcctgaggaggctacatctgtagatataggaacatctccattcgggaggctacgtctatatcacagtaaacatctcacatcaggtcttacccaatctcatgtcatctatcctactaccataggattcaacaatcaaccatgcaggtcataagctagacaattcatagccacacatatcaaccacccatctcagggtgcagctcacagatcaagcattccataacaattcacatcaattgcccttttacagggtacaacacaccattcagtagtcaatcatacagcaaacaatttccatatacatgcatatcatcacaacacaaccatcaccctattaggatcatggtggaacatagtaaaggacgcacatgcaagaaccaagagcttacctgctctaggcaaaataccggctctcccggcctcgtggtcaccaccactagaactatcaagctcacgtcctacataaaacaaatacacaatgtatcagtaacggtcctaagccgttagatcgaaaggaaactacaattccttccacataacccataacaatcacttcacaagtgattctcagaccctcagaaggatcctactcaacctacacaaggctccagagcctcttctaagactctgatcaaagcatatcccggcttatccagatcaattctgaacctctcaatatcaccacttccagctcaccaacaacatctatactatctcatgagcaactctgtcaactgcactaaggttcgtattagccaattaatcagccttttgcctctgctcagacatactcagattcaaaatcaaacttcatcaataatgatgactcaaggatctaacttcatcagagtaaccctctgaacacaaaactctatagagtccaagcctaacaacagctctaacacctccaaaaacacctctctaggtactcaaaatccaacaaaaacccaaacacagaatcaacggctaaggctcgagtttcttacctctgtgtagtccagacacaccagggaatcactttccttaaggtagatcgctcaatcaaagcttctttcgcctctgattcttcgattccaaggactcccttagaaatctcgatctcgccgtttaccgtcccttgtcgagaataaagctgggtctctagcttatctcgaggctctgaacactttctcagttgggtcagaggtgtttagatgaaagatgaagaagatatgaagctccaaagtccatcaatggcttccctctctttcttcctctcttttctctcttattttcgtccaaatgagctatttataaaagctgacccgaaagtcccgcgcggttcgcgccaggtgccgcgctgatcgcgccatggttcgagtaacccatgccattagcgccaaatccacgcggatagcgtgaaatggccgcaaggattggcctgatccaagcttcccgcgctgatcgtgccatagccacgctaatcgcgccatctgttcaaacaactcacgctgttagcgccacagccacgcggatagcgtgagatggccgccaacattggcctgattcaaccattccacgcggatcgcgccgtgccccgcgctaactacgccacaagttcgaaccagccacgcgagtagcgccatgtccacgctaatagcgtcagaaggccgaaagcattgcccttattcaagcctcccgcgcggatagcaccagaccccacgcgggtcgcgccacatgttcgaatctgttttctccttctcttaagcttcctttaaggaattctaatgcatgattatggttcttaatctcaggcttcatcctatgcttaaaaatccaggtattacacaacgcccgtccaacaccagtaactggagacagcctcagaaacacatggtcgccctcctcaaactgtagcggcctgtgtttatgatcatagaaacttttctgtcgactgtgagctctcaacagcttatccctaattgatctgatctgctcagaagtctcctgaaccatatcaggccctaacagctgtctctcacctacctcagtccaacaaacaggagttctacatcttcggccatacaaggcctcaaagggagccatgcccaagctcgcatgataattgttattatatgagaactccaccagaggtagatatctatcccatctaacaccctgctccaaagcacaggctctcagcatatcctctgacgtctggatggtcctctcagtctggccatctgtctgaggatgataagctgtactaagcctcaactgggttccaaacgcctcctgaagtgcactccaaaacctggaagtgaacttaggatctctgtcactaacaatattctcaggaaccccatgcaatctaacaatctctctgagatatagctgagccagcttctctgcagtgtagtcagtcctcacaggcaagaaatgagcagacttggtcagtctatcaacaatcacccagatggaatcacatctagtctgagtcctcggcagcccagtcacaaagtccatggaaatgctgtcccatttccactcaggaatctgtaatggctgaatcagacctgacggtctctgatgctcaatctttaccttctgacatactaaacatctggacacatactcgactatgtctctcttcatccctggccaccagaatctcctcctgaggtcctgatacatcttggtagcacctgggtgaatactgaactggcccttatgagcctcagtcagaactgcatcaaccaactcgcccttaggcaccacaatccgatcctggtacatcatcaaatcatcaggctcccagctaaaatcttgctggcccatcaggtttatcacagagtcatcctatttctgagcctctcggatcctctgtattaactcattaccaactttggtcctactcaacttaagaccactagcaccctcaatcacagtcaaatgcatatctctgaactgttcaatcaactcatagtcagagagcatcatgcaggcaacactcacatgcttcctactcaaggcgtcagccacaacattcgccttgcctggatggtatctcaactcaaactcataatccttgaggaattccatccatcgtctctgtctcatattcagctctttctgattaaacagatatttgagactcttatgatcactgaataccaccaactgggcaccatacaaataatgcctccatacctttagagcaaagacaatagctgcaagctctaaatcatgggtaagataattctcctcatgtggcttcaactgtctggaagcataggcaacaacccgcttctcctgcatcagtacgcaaccaaggccccacttggaagcgtcacaatatacctcaaaatgtccctcagggtcaggaaggaccaacactggagcggtggtcaacttctctttcaacctctcccaagtcatcactgcatccaccttactaggatccactgatacaccagctgcagaaatcatatggcccaggaatttcacctctgaaagccaaaactcacacttagataacttagcatacagctgatggtctctcagaatctgcaagacagttctgaggtgctcaacatgttcctcctgactcctggagtagatcagtatatcatctataaacactaccacaaactgatccaggtatggtctgaaaatcatgttcatataatccatgaacactgctggggcatttgtcaaaccaaaaggaatgacctgaaactcatagtgaccatacctcgacctgaagccatcttcggtacatcatcgggcttaatctgaatctgatggtatccggatctcaggtctatcttggagaacacacaggctcccctcaattgatctaacaagtcatcaatacgaggcagagggtacttattcttaacagtaaatatcttctcatggtaaatatcttctctaaggcctgtagcatataggtggcatagagaagtctgtggtgatctgaacactccatcatggtaaatatcttctctaaggcctgtagccatctagccaccactacaggatcataatctccatgaaacaccggaggatcatgcttacgaaaagctgtaagcatcctccctctagccacagtctcctcctccaaaagtgactgtgaaggtcctcctccgaggtggctagctccacccatctggtgactaccctcgccctcatgtacaggatgtggagaaggtactctatcttctctacgctgagatctcaactcagccatcaactcctcattggccttcatcaaggcctcattagcctgcctgcttgcagctatctcctgctgcatagcggccaaggcggctgccactgggtcagggtgttcatctgcacccgcctcacccccgttgttccgggttctcatcatggtactgcacattccatttgataaggatggaatttatgttcaaattatactttattaatgttagaattttattgataaatgatttgtaagtatttgagttggagtttttttgaaccttgagacataagatatgtctaacctgatcagtaagctactgatatctaattcacctatatttttttataaaaaaaaaagatgtattttatctaaaccttttaaaaattaactacttatacatactttttcaacaatactcctactttttcaacaactactcctaccttatattctgacctaggacggctcaattttcattttctttttatcagtgtgacatattgacaaactcagccgcagggatttaaaatcttctacatatacattttcaactccacaaattttaaccttttaaaaaaaattatataaaattgaaacatgaaaatttcttttaaaagttaatcaccgtcaggtttagaattgcattctttacagttcaattatcaactttggaggatccatttcccagctccagctagtggtgacacaggcgtggtgccctggatctcacccacaagtcaaatttcaaggtggaggcgtggagccatttgtcttaatgttgctttttatcttatcaccatttttctaggttacaatggctgttgttgttttttttttcttttttttttttttaaataaaagtagtaggacacagtgaggtactctccatatagtactaacttatatttttttatgagaaaaactgttatggagtaacattttatattttcatacaatcttaaattattatgtataataaatttattaatttgtataaatttatcttaaaactcatattaataatgatttatgattaatatagtataaaacttagtaaatcacctttaaaaattactctaaatataacttttatattaataattataagatttagcaattatactattcattaatgacaattcacgattaaacaattgtataatcttttttacaatataaggatattctaattaaattcactaacaaaacactaatgagttgttcaaaattttgtaggtatataagacacaaagaacaaataaaaccatattaaaaatataaggctgaaatatagaaagaatttcttatcttatttttttttttgttttaaatgggtgtcctgacttttaaaagttctaaaatgattctcttatttaattcatgacaaatttagtccttttaaaaaattgatcttttatttatttgtttttgaacatgattttgaaccttttttatggattcaagatgtgaaacttgtttcattagattcacctacatcgaactataagaatcaattaatattcggaacaaaaaagtgaacaaataagagaaccattttaaaacttttaaaagttaggagatcgattttgaacaaaaaaataagttagcagaccatttgtatattttagcctaaatataattaacacaatgatataattaatatgaaatagaaaggatttcttacttaaaaaacaactagcaatttctcgtaaggataattgtagaatatataataagacaattttgttatttaagcgcaaatgcattccaacaaacagggaatgtgcaaaaatggactttaccatctcgtcaatgaacttggcccataaacgagctaaggctcttgaataaggctcttcaggcaagatggggttccctttccaagtctcatctatatattcaagaatcacaagagactctattatgggcttctagttgtgaacaaacacaagaaccttcttatggatagggttgtatttgagtaggagttggctcttgtgctccaaattatcttcaaggaattcgtattggacacccttcagtttcagcgtaagctgcaccccggaaacaaatgggttaatttctaacaactcccaaaagtttcacttcctctttgtgacttttagccactcaatttgctggacctagactttgattcctaataagttttctacttttctttatagatatggaactaggttgctgaaagaaagaaatttagatttgatttttcaagcatattttgacttcttcaatatgggcggctttatttgaaatatatctttaatcatcatcaggattattattattattattattattattattattattattattattattattattattattatatctaacgttaaataattgtttagattaaaaatttaacttcatcataatcgttgatttgaatcaatttgatctaacattaataaaaaaagtaaatgtcttgcattaatgttcattattatataattcatttatttttttatacaagtacttaatatagcatgttaaaatatcaatattagttatcattaaattaaaatttgttatgagacatgtaacattaaaataataataataataattcatactgttttgttataagatattacaattttacattcttaaaaatttagactataaaaaaaatactcattttttttacattaataaatattaattgttaattgctagtttttttgttaatgcgagggataatgaaatccatgacatttcccttcctttcttcttctttttctaccaagctaaccttataacttctacccatcaattcatgaattaaatttattagatttactattgaattaaatttgtaacaatcaagacatgattaaaaaataaatctaataaatatgggttttacaaatattatttttttttcaaaacgaataaaaaaatcattttaaaataattaacaattacatttaattaataaaaatcatgttatttcaaaaaaatttaagtttttttacaacaaacacattaaaaatattaattataaacaataaaatttaatacatattaacataatatctgaaataactaaacactcatttttaaataattatattcatatttttaagacttttttatatttttaatttatatatgtattataaacattatatcgctattgttacttggagacagaatgaatcataataaatttcaataggattgaaattttaagaatattcaattaaaattataataaaccatcttcatcaattttaatataattatatttaatttaattttcaatgttaataaacttaataattttcaattttaatctacatattttttttcaattaaaaatatcttcttaattaaaaacaatattaatcatttttcaattttaatatgattatattaatatgccgctacatttttttctaatatatgctgctacatgttttaaacattcaatttatttatgtacatatatttttaattatatattttaaataaacccgtgtacgagtttaaaattcagtttaagctaaattgtatttttcgtttttttataatatctaatttgtgattttaaccctttttttaagatttgaatcaatgatcgtgtccttttctttcactagataaatcacttattaagtcacttgtaacttgtttgaatcataatataaacactttgttatatttaacaataataattcctaaaatttactacacatcttaccttcctactttgaaaggtgagaatattttatgtactacacatcttattgtcctacattcctactttatttttgaaaactaagatgaaactttaagcacatcttaccttttcagtgttcaaatttgaaacttcaattgaatagtgtactttgttttttatgtagtttcaaccctttgtaatatttgttatgaatactatatttttgtattatttaattctttagcttttgaaaatgacatacatagtagtccatgatataaatatgagttataaagttattacaaagtagtcaatgaatgttgaaataatttgtaggggttgattcaatttaatttgaaatgattaatctgaaacgaaattagttagacaacattgtgtaatggcataatcttgaatgaaattatcttataatatttggtactttaaattttagagtatggattgatcaatcaaattatgttagtgtgtgtgtgtataagaaatattaaactttgataaatggaaattacattaaaatcctttcactctagccacgcccggtccaacatgttgagcttaacattttcttctgcaaaaccactagactccatgtttgtttcacacgttgccacttcttcaaatgctattaatgttgacacttcatcaaatgttttcaatgttggaacaaagttctctttcctattgatgctaccaaaatgagtcaaaactttattgactcctacccctctctagggaaggttgcttctattgatgaatggtgattttgctccctttgcagggctaacacatcatgtcgaagaaaagcttggtgtgccaatagatggtttaggaggagtgggttggctaggcattgagtatagaacagaaatgctcttgtgagaaattacaataactttttggagagataagattggattagaatgttttgccaagtcatcaacataaagtacatctcaatgcgtgcaacaatgtttgatgacaagctctctagtactcgtgagtagctctctagaatgaatttcccaacatcctagaaataggtaggacaattttgaagtgcttagatcaaaattttcaaaacccgaaatatgtattttgcctttttatatttcttgagtgttgaaaatttggataacaacacttcaaaattgtttgtctattttctatgatgttgggaaatccattatggagagttactcacatgtattagagagttcaacgtcaatcattgttatgcacattaatgacgtgctctatgttgatgacttgacaaacattcgaatccagtctcatatctcccaaaagttagtgtaatttctcataagaatatttttgttccatacttaaatgcttggaacaaccagtcctcctaatccatcttttggcacactaagcttttctccaacacgatatgttaccctacaaagggagctaaataaccattgatcaatagaggcaaccgttccaagaaaggggcaagagtcaataaacttttgactcattttggtagcattgagaggaaagaaaagtttgttccaacattggaaacatttgattaagttccaacttgaacaacatttgacgaagtggcaacatgtcaaacaaacattgagtctaatgattttgcaaaagatgttaagctcaatatgttggaccgggcatggctagagtgaaaggattttaatgcacaagccatttatcaaagtttaatattttaaatatatatatatatatggtagataatgataatatgagtggtaggggaagatttactggtagagggagaggtggaggtaccattatttttccacaaccttgtacttcccaattcacacatgctattgggaagcccatacatactacacttaaacatcatttgacatcccaaacacctagaacaccctaacttaattggtctacatctacctatttttctagcccacaaatcctaccggacaatccactcatccttctagatctgaaacacctatagctccccaacttaatcggtctaaatctagctctcatttttagcccacatagccttccatacccagacacctataactccccaaattaaccgatctacatttagccatctatttcatcccatacatcctactaacaaaccatgtatcattccacaaccaacacacaaccaccaccaagtagatgttgcatttgttgacaatccatatgtagcatcatcacatgttgatccacctatgcagatttggatcttagagctcgatggacgtagatggacttgtctaggtacacaaaacatgtatgtttataagttttttccttaagttcaatataaaatgtatgttaagagttatatgtaacaccttaaaatcttttttaggaaatataactttaaaatcatttaaataataaatattgtggaatacacatcattaaatctagtttctatttctaagttgataaaatatctcaatatttttttttttgagaaaagaaggaacacatatacatatatatgttgcacttgatcaaaacatgtacatataattaaaatgctcatgaataaagggtattgtcaaaacacgttttctatttaaaatcatttcgaaagttgttatttttctttcaccgttacacagcgctataaaaaaacaacttataaagaattaacttgcacaaaactaaatactgataaactgaaagaaatacgtaatcatacataatgaccctcaagatataaatatagataccaaagtcattacaactattaacaagaaaacaaaatatccactgcccctcaaaatattacacagtatcaccaaaaggtttaatacaacaaaatatcgcaacactgagtatagaaatctttccgtccaaaatatacataaaaaagagaaaacaatcctacactcaaagcagttactacccaagacctacaagttatacgtagtgtgtgcctttatagtgatcgatgatatttagggcttatctaataccaaaaagtgacaccagatgtaaccaaagtgcgcgtggtggcacgcttcttcgtccaccgtgtggctgtagtgtagctattgatccaagtgaacatcctcagtggatgtttcatgacctcaccttaaaatggtggttgcaagggtgagtcctccactcctcaaacgccacaaacaacaggcaatatcaaagcaaaactaaaacatataatctatgtaaccactgcgtgtgattatctaaacaaacaacactctcgcatcctaagcgcgtaactatcacacttatttcactacagggcccaatcactgccatcaatcctcctaggtcttgatggtattacaaaatcatgtggatgatagtcgggagtaatcgctacatatggattcgtacaccaatccctcatttcccaactcaataaacatagtctcggagcctttttagaagtagcaaagtgaggcctgtgagttatcctcactaaataagtgcaccaaatgccaggtaatcaccactcactaatttccctatgttcttcgaacctctccacccactacacctaatgtatttctgtccatcatccacttcctcaacacaaacagaaggaaatagaaccactggttcttttactctctgtccaatcctcttgaatcttgccatcgtatcgcgtatgcagtccttgtaccacgtacatcaacgaacgcttacaaacaagcaaacaagaaagagacgaggctcaagcctaggtactactgtcagggaaccagttgttgccccttaagcggtaaaaccacttgtcatacaaaataatcgaaaaacataacgactgtaattataactatctaaacaaacatagcaaataatttaccgagggtcgaacacccttgaacccaaaccataacgcatacagataaaaatgacaatattcagacacaatatatattataaaataaatttgcatgtaccagatataattgtcggagttcacacgctatcggtcttatcattcaataatcataatagaatacatgcactcattttagtagttttatcaataaggaattatcacaagaacatgtattagtcattagatcttgcatttattttagcaatataataggaaatacatcaacagttccaaaaaataaataattctaagataatttacacggaggcacggattccaaagttaaattatctactatctaaaatcaccctgtcactcaatttttcacagttttgctcctaacttattatgctctcggtgttccgagagtcgaattttcgcaaatcttatatgctaccctatattttcaaacctagcaaactcattgttgaggttaaaactttaataaaaatagttcatacttatgtaactctcagtccaaattcgtgaaagatttttcattttacttaaggtctttaaacttgttttatttgtaacttttgctaggaaactccgatttaagtgaatttaaggctaaatctatatcttaacatgcaaaaaaactcatttttggcataaaaaactcaaggaaaagggatcagaactgtaacaccccgtgtgcacccagtgtattaacattatacaatatcagaataacgcagcaagcatggaaaaaaacaataaaggaatcctgaattcaatataaatacacattatatacatatatggtgaatttatgtcatatacaagatccatttcctcaaaactatacaaataacccataagggtatcaaaatacagacaaaatgaacaaacaggagctaacgagctcagtcctctaaccctaggattatcttcacactctatcccagctcaggcctcttgccttgggatttctcagacactcctgtctctgttcctgtaacatgagccccaaaacaagggtgagataatcatcccagtaaactcagggttctcggaggtttccctccccctggttcacttcccaacatgtaaatacatgtacatataacataatataacagaaatcagattatacaatcaaccttcacggctcataagtacaagctatattcacatggcatctcaacacacatatgcaacaacacatagtgcctgagagagatcatccaccgagttggtacattctctcaggactttccatcgagtacctgaataggatcatccactgagtgggtacatctactcaggacttgccgcccaatacctgaataggatcatccaccgagtgggtacatctactcagggtttacatggacgcctatggattatcccaaaggagatcatccaccgagtgggaacattcccaaggggtccatagtacctcatactactggccagtagatctcatacaaacacatcacaatcatctcatatagaattcacacaagcctacactatactagtgtactcaatccagtcatcataatcaatgcaacatacaccatcacagtgtagccaatacaagtacaccctatctcagggtttggctagcattcaattgccagcatatatcatcaagatatttcatcaacatcaaacacataattcagtgtcatagcatcataaaacataagtgtacaagatataacaaacaaacacccaatgtgggtgtagtgaacaccagcaggggaaaacaatccccacgaacattgagcttacctggtagtagctcagaaacagctctcctagtctcgtggtgccctccaccagtgctatgcgtctcacgctctacaataggcatgaaataaacaatcagaaacggtgttcaaccgtttatatggaaggaaacacccttcctctcataaacaattcagagtcttctaacttaaggtttatcttagcccagcttctactaggtcctgcattgaccctcaatggtctgccttagtctcactaaggcctcagagttcctttaaaactctgtacaattcaattcacagttttataaataccaaaaatccaacagttgtccaactcagccaaatcggatatatcaacatattttcacagttcatttggccttatgaacaacttttgtaaaggtactttaggtatttcaggccataatgttgctcattcacacatcattttcccatcccagagccaaactcaaacttcatcacaatttcagttttgacatgccatatggctcagaacaacctcctgactacatttccctaaagaacctaagcctaataccagccctataaccaattggtcactattcacccacttcctattccatgaattaaacggttaaaacggagatttcttacctcaattccaacaagaaagactggagaagcttttctcctagtactgatgcccttagattgccttctttatctacttagagctcagctctctcttgacactcaaagaatgggattcttctcacaattctcacaacacaaggttggattttggctttcaactggttccaatcagatttaaaggtgattaggaggtgttttaatggcttataatggagatatgaagctcctaaggtgctctaatggctgtctgggctcaaggaggaagaggaacagtgatttttccagaaaaatcgcgatttggccttttataggcggcctaaccgacatgtcgtgcccttggcgccactttggcgctcttggcgccactttccagtgcctctggcgcccttggcgccacctttcagtgcatctggtgcccatggcgccactttggcgttcccagcgccagtttccagcatctgtggcgttcctggcgccactctggcgctcttggcgccaacttccagcacctgtggcgctcttggcgccagactccgtcgctaaaatccgtcgctaaatccgtcgctaattcgtcgctaaggtttttgcgacagaattttataaatttaaattcttatttcttttactccttttttttttatataatgccgtaggctattataagaacatagattcaggacatgccagtaagctcgaaaatttcaaagtaacaacatgttcaaggaagttcaacaacaaacacacggttcaagagttggagagatcccccttacctttggtagcctccacgaaatttagaaggaagaattagggattttaattcaattttcaaccttcaagagtgcacaataaggttcgaaactacaagtgagaatagagcaagaaaatgaagtgaaaatcaagcttagagttgaaaatggaggtcacttacttaagcttgatggaagaagggctcaagaacacttggtaaaacttggaagaagaagaaaaatatgctctcctctttctccaaaagcttcagcaaaatgggagaactggcctaggctttggctttttaaaaacaacacttattgtaggtggaatgcttagaccaacgacattgcaaagtctaatccttatcttcttaatctaagcactttgaatgaccattaatatgactaattggtagcttggacagtccttgaggtgttctccatgaactcagccatggcttatatcgcttcttgcacttttcgaaaactaactataaaaggataaagtagagttttgccaaaaatggtaaaaactatttttgctacaactggtaaatattattccaatcttctagattagtgtgctaacttcttagaatagtgtgctaacctcccttgggatatgtgtactccgagtgagccttgcacagagtccactcacatagaaacaaattacactacaacttaatgcacagtgcaattcttgctcaaatggaaatctagctgagacaatttatttttctctgtcaagatttactaaatcaatcacacacacacaacacaaaattatatgattaaaaacatataactactgaaattaaattcatacatgcacagtttatacaacacagagtttcctctgttagtttgagttgtaatttttaagagtgttataactctaacttattttaattattctacgtcatataattagacactttaattagtcaccaactaattaaactaaaattctatttttaaatagttatagagtcatttacgaatatgccctccactttaaactcttatgacttaattaccccttttctaattctatggaatctaaatcaccaatagtcaaccttagttatccccacttaatttctaactttacttactaattttatttcaagcttctaatttctatttctataccacaatccaattcttaacatctagatcattaataagttgaccattatttgaccagtctctgaaatatccttattctttgtagactttatcttaaaaacttaagagtttaaccatgcctaggtatcctattgtaacatctcatttttttttaccatttcaatagtctagaaacactacccaatcacataacaaagtaatatcattgtctaccacacacacatggaaaattgggatgttacattataacttgttcaaagttgttttcataggtttgatcctctaattcataccacatgttaaattacaaagataatgaaagggaaattcgaagggtgatgggaaacttatggaaaggtgaagagtaaaatcccaaatgtggcacaaatatggtttgaagaatttgaggtacgatgaggaaaatcattgcattcttagtaacttattatatatgttttattttcactaaattgaacatttaaaatataatgattttctaactttttttaatgcagagaaagtataagtggctacttgagcataatacaaaaattaaaataaaaacatttgatcataaagcttctaaagggtactcaaatgcaatgtatagggtacgacgtggtgttcatgcagggagttggattctagcattaatgtgtaaggaattagaaaaaaatggagcaacctaaattgacatgataaagcaaaaactaatgccaacaataggaattcctcttatggttcactgcatataggaggattatttcctacatccgagcattttaagagactagtatgtaataactatatttacttttatatttcttaggaagaacattataatttaaagttatttacatattttattttcataaaaatctgcagatgagtccaacatgctaggagctatttcaaaagacctataaggctgctaagggtaattcatgggtgtcctctacgacacaaatgattgttgtaagttacataatctcataagttttggctagtgtttgatgtataaaacaaatattgtgatataactgtagtgatgttaagtggacatgcaccaaattttttgagtagtttgtgaatcaataagttaagtccttgaaaagttataatttatgagttttagttaatcaatatgcattttttcaatgtgtaaaacattagaatgcatgaagaaaattgtgcataataacataaatttgatttaagtgtatactacacactactcaactttgtttcctactttggtttagccaatatattagttcatctttttagtgaacttagagcatctcttggccagttagggaccattttattgagatattgagattatttaacttaagataattctagacatgagatttggtgttaagttatacctaatacaaatcagactcaacttttaaaattgaattttgcacccctagtttacaaataattattgaatgaaaaaagcaccgttgttagggtgctagtgtacaatgtagttgtgatttctctgtaatttcattcttattgatttatctacataatagatatcttcaaatcaatttacaatgttgaatgctaagtcttctagtactcgagtaactttgtattatttctttccttaaatcttgcaaaagatattaggtctaaattgttgatatttggtagaggaggatatttcttatttctctttatcttgtttacttcgcacgatagatatctatacgatggtgtcctaaaatgttctgcatttgttaaaatgtccttgtaaatgtcttcatggtatttcttaacttggtttttctatatgatgtaaatcaattttatttttcttctttttaccctattttgagatttttatacattgactatacatatgtgaaatatgatgagttgaatcaagtatgtgattttggttacttaacataaagatatcctttgaattaattatacatgatttgttagtttgatttaaacttttgtttcttcagaatgagtataaaaaacacattttaaagagagactcacaggagatatctgaggatggtgtatccagtcattagtctaacaacaatgtcctctatgatgttgttggaggtatagacaaaaaaggataggtatttggtctaggttcaaaggctgggaaatacaaaccttctttcttatccatatcatctgatggcttcttaacatatgagctcaagtttccaatttgaatgaaggaaataagaaactaaaagagatgtttcttgcatcactagaaaatggtcgttttttcatgagcaaatggcttgatttgtggagagtttatttcttgggcaagcatctcaaccagttaaatgtggtcaacaacctcatgtagatgatcaacaagatgatgaattagatgataatatggatgtttataaatttattatatattcttattatgttaaaaactgagactctcaataggtattttgaaactttaaattggtattttgagaatagttattttgagactttcaatgtttaacataactttgaatgttgttaatatatctactactagaaattatgagatgttaagctatacttttaattctatttaacttgcttatttattatatttgattttcatcattcttgatagttacgaatttgcatagaaaaataattacttattgtcacattctacaaataggattggtctagtgggggttggtgtagatgaatcaaaatttaaaaaaaaatgcttattacttaatttgtgagggaataaatctgacataagatagtatgtctgtcacaaataatggaggagtaggtgtacaaaatgttgtttgtgatggaaataattcttaacaattttcgagggacaatgcattcgtcacaaatagagaacaaaaatttgtcaaaaaataatcatttgttgcgatacatgacatcaacaatctgtaataatttgtgagaaatttatgtccatcacacatagtgaatggaattcataacgttcatttattttcataaaatgtgatgaatgttttaaatgatgtgacaaaataaattccatcagtctatgacaacacaaaaaaaatctgtggtttaggtgtttatgacgccaaaattgcgagaacattattccaccacaaactcattatgtgacgatttttttttatattgttatgtatttgaccccttactaatttcgatttttctagtacattctgaaaaaattaccacataacttttagcttaaaagaagcttttaagctaataaatgtaaatttgacaaacaacttatacttatttttttaagctctagtaatgttttacttttacttagaagtaacttttaagtaaaaaaatcagttaggcgaaacacaaccaaagaatcatgaaaggtttagaagcttgtttaactatagcacgtttgacattgattagtacattaggttattattttattaaagtgcttaagaaggaaaagtcttgttgctaaaagaacttttgatttctgttcaagaagcttgagaagaaaataaaatcaaaagattttttttgttcaggaaaaatatagtcagttcctgtgtgactattcaacatccttctaatgaccaactgatccacttcaatttttcgtttacgatggaaacatatatatatatatatatatatatatatatatatatatattaaatgaacatttataaaatgaaatatattttcttattattaatattttttaaaaaaaattatctatatgaccaagttatatacaagttaaaatatattataaagataatggtatttggagcaagcatttgtataaattaaaataatataagatatcaataattataattatgttaatatattttagaaacaatggcatgtagtgaactaattaatacactacaatatcaaagggacaagtttatattagagtgcattaatatatctatatttatctatctataatatatgtaaagtgtaacaccccggacgtgctaacattaatgataccaaaccacgctaaaagcgttatacatgcggtgtgcggaagcgacaagatcgtttttcttgattacattatgtatgaaatttaaaacacaaccaaaacataaaacaacaaatactgaaccagataaaacacatacacaataggcagatacaagactgatacagatatactcaggaggaaacataacatacacaatctcaccactgtatatatacatgctcaaaaacatgaccacaggcggtcatttatgaaatacgtacagaaatagggtgtacacacacaccctgtctctaaccgacctaaaccagctcccactctggaagctctgcaccggtcttcaactgcagcctcctccagcctgatatcttcactagggcctcctgccctgaggtcgcttctttgctccagcagaagctcctgaaaaccacaaaccccacacagggtgagacatacgtctcagcaagctcagggtcctgggaaaaacctccctcaccctgttttaccaccaagacataaaatgaacagagaaaagagctagagatacattctccgctcatacacacactcccaacagtctgggatcataacacgggatgcccatggcatctgaggtctacacctcttactggctcctagagccatctttccggggtctcaaccatgcccctggcccagccatctaactctggttttcgtagcctgtctcctagaggtacattatcatcagtgtcactcactggacactgtatccaccagagacacatcgtctcctactaaacctacaatgcctgaggactattactcaagacttcatatatccagatatggctcatttaagaggctctaggctcttctcccccttgagaagccctctcttagagatacaacatatctgtcactaactggcctgggaaacagatccaggactttctaccatctgcctgggaagtcctctcacacaggaggcaccgtcctcaggacttaaacccacatgcctaagagagttcatctcacacaggaggcacacgtctcttaggacttccaaccctggcctgaggagtcatctcacaaaggaggcaccgtcgctcaggactttccactactggcctgaggcgtcatctcacacaggaggcaccagcactcaggactttcactgcccgggaagtcatctcacaaaggaggcaccatccacagggcttctcactacctgggaagtcatctcacgacggaggcaccatccacaggtcataccactacccgggaagtcatctcacacaggaggcaccatccacgggttctccactacctgggaagtcatctcacacaggaggcaccatccacaggtcataccactacgggagcaccatccacaggacttatccacactggcctggaaataaccgtccaggacttcaaacacatctgcctgagaacctatgctcaggactttctcacatctctgcctaaggaggaacatcacacagttccatcagtccttaggacttaagtggagagcagtggcacctcccatggaataccagccgttccagggagtcctcaagcccttcctctggctagggaacctcagctagcccgataccagcccggtaccctataggttccatcacagaccatctcatggtctgcatccactcacatggcccacggccttacacctgactgatcaggtgcctcatacgactcaccatagcaggtgactatcctagggttcatccatttcagcctagcacacactaggccatagcatatatcataaaacataggccgcatggccttcaaatccaaacagcatgcccacatacacatatatacatgtgctcacacacgcatggcatgcattacatcacccatcagggtggcaaccaagggaaaagggggcgaatccccagaacgatgagcttacctctcttagccgaacttcatagctctgctcctggcttgatggtctgcttcattgacactctaagtgtcaagccctgtcaaggcacacaacacacattacagaccattcaacaacacataagctcgtcaggcaggcatccctgcctcagggaaaggaatcacaatcctctccatcaacttaggtcacctgcctaaggttcctcaggctcatctaaccacaagcctttctatagaccctcagtggtctacacaaatcaaccatggctttagagtcaccacagactcagcctcagccatcaactgagcttctcagctcactctacccctaaccacagggtttctcagggcttgaacggtctaatccactggactccgttcccttggcctcacaggcaccaccagcccatcattcaggctctggcatgttccaaatcaagtgactcaaccacagtcacccatgcctatcctagagccagaacccacattctccaattcacaaattgaaagctaatccttcctcctcacatcattctaaacacttctctcaactggacccagagctaattctagcccaatcacagatgggtcactatttacccaaaacccccaaacagaaaatcaaccggagaaactcgagtttcttacctcaatggcgacacagatgacctctggaacgttcctcctagctccggtgtccgtggatagtcgccgttcctcctcaatctcgagttctctcaacctctctgaaggtttctcagaacttggggttttagggaatagggagggaggattctcgctctcaagggctcctctcaagatcaaaggccaatagaaggtgtttaggccatggtataaggtcctagaaagcttggggaggcctctaatggctgctagggccgtggggaaggaggaggagggtttttccctctgaaaaacgcgaccttcgttcttataaaagcttcaccaaccttcccacgcgactcgcgcccgaaaccacgcacgtcgcgccataacaaaccacgcgactcgcgccgtttaccacgcgactcgcgccatacctacgggccttccacgcgaggtacgtgaacattcacgcgactcgcgtgaacctgccgagactccgcgcgactcgcgccatacccccacgcgacccacgtgggataccagagaagaatctggttttctaagcctcatcccacgcgatccacgtcgcgtgtggcgcgacccgcgccacaccctctgcagggttttctgacctgaatccccgcgcgatcgcgcggggttaagcgccatgaataagggtctttacataaaggagagttgaaactctaataaccattagatcaaaattttaacttcatcatattttttgatttgaatcaatttaatatgacattattgaaaaattagatgccttgcattaatgttcaataatataattatcagtgaattaaatttattatcagatatatgtatgtgaaataataataataatgataataaattattattattattattattattattattattatttcatactaattcattataagatattataatttttacagtcttataaatttaggccataaaaaatatcaaatacccattaatacatacaccaaatcaactaatcatatttgtaatggattaaattattatatttactcttgaattaaattggtaacaatcaagtcatgattaaaaagtaaatctaatatatacagattttaagaaatacaattttaaaataaatattattatttttgttaaaactgaataaaatatataattttaaaataattaacaagtacatttaattaataaaattgagctatttcaatatttttttaagataattaatttttacaacaaacgcatttaaaatattaatataaatactatatgaaaagagacttaaaacttttagaatgttggatcaaaattttatcttcatcctaattgatgattttaatcaatctaataaaacattaacagtagttgaattaaaattttaacttcatttatagttatttaatttatttaaaataaaatttgaaaattttgtaaaagtaatttaaaaattcatttagagtagattattaaaagataaaataaaaattaatttttaaatgaaaacatatttttggtagaaaaataaaaacattttttgaagttgtataaatcaatcagatctaacaataagagttgtttggattaaaaatttaactttgtcatagtggttgatttgaatcaatttgatttagagtaaattacactcgcactccttatgctttttctaaattgcatccgatacccctctatttttggagtaaaagtaaaaaattagagttaaaaaaaataagttgtttgtcaaatttaccttttttagcttaaaagtttattttaagctaaaagttgtttggtaaggttttttaaaatgtcactactagaacaatctaaattagataggggtcaaattcgtcataaaataaataaaaatccgtcacataatgagtttgtgaaggaataatgatctcacaaattttgacgtctcaaatactttaacgagagattttttttgtctcgtcacagacaatgaagaaattcttccatcagattttatgatggacacaaattcctcacaaattatgaaggattgtcgtcatcatatattgcaacaaatgattagtttgtcacaacgttttcttctctatttgtgacggatgcattgtcccttgtaaattgtgaagaattatctcctgcacacacaacattttacacacttactcctccattatttgtgatggatttattacctaacaaattaagtattaagcatttctttttttattttgattcatctaccctaacccttcactagaccaatcttgtgcatacaatctgacaataagtaatcatgcttctatgcaaatttgtaaataaaaagaataattcaaatcaaatataataaataagttaaatggaattaaaaagtttgtttaacatcctataatttctagcagtggatatactaacaacattcaaagttttgttgaacattgaaagtctcaaaatacatattaagagtctcacaatttgtaacttaataagaatatatgataaatttctaaacattcatattatcatctaattcattatcttgttgatcatctacatgaggttgtggaccacaatgaattggttgagatgtttgaccaagagaaaaaaaatctccataaattgagtcatttgctcacagaactaacaaccatcttgttgtgatgcaagaaacatctctttcaaattcttatttccttaagtaaaattggaaacttgagctcataaagtgagaagtcgtcagatgatatggaaaaggaagaaggtttgtatttcccttcctcagatatctcctttgagtttctctttaaaatgtgtttttcatagttgttctggaaaaaaataaagtttacatcaaactaataaatcatcactactataggcgaggctttcaacgacggttctaaaccccataggatgacggttatagaactgtcgttgttgcacgtgtcattgaaaaacattacttttgacgacggttcacaaaaccatctttgttgatgttttttttccatacatatgaagacgatttttagcagaaaccgtctttgtatgtacggatacaaagacggttttagctaaaaatcatctttgtttctcgtgtctttttttacatgcatacaaagacagtttttatccaaaaccgtctttgtatgtatagatacaatgacgattttggctaaaaatcgtctttgtttctcgtgtctttttttttacatacatacaaagacagttttagcaaaaaccatcatctttgtttctcgtgtcttttttttatatacatacgaagacaatttttagacaaaaccgtctttgtatatatggatacaaaaaccatctttgtttctcgtgtcttaattttttttacatacctacgaagacgattttgtagtcaatgaacttaactgaatttacacttacaaaaaaacaccacattgaataatttttattctataaaataaataacaaatcaaattgttagtacgctaaaattttgaacgagagcttagcattgtaaaatgccgttcgacacgaaattatgtcaaatagaatgacattaaaataaataacaaaccatgattttatataacatcattaaaataaataacctactttatagcctgcaacatcttagtgacaacacaatgaaagtaacatataaggctaatattgttgcttcacaaggttgaatcatcatcaacgaaaccatgtggttctgttgaagttaaatatatcctcaatatatttacctgcatcaacaacaagtagaacaaaagaaaaaaatatagtcataattggatttcattgacgtcatttactagaaatcaaagccttgaattctggaggtacaaaagccgaaaaatcaatgctacatattaagttttttgctgtcacaacccagtgtacaataacatttactcatgaatattaaaaattaaagcagtgcacaactatactagagtaagaaatttttcctcatgaatttgtaccaattgaaacagagattttttgttaaatataaaattaaataactaaaaaagtcaaataattaaacacatatcaatcaataaatcacgtgtgatgagtcactatttacctttattttctcatctttctgtactcattttaatccctaatttgtgtttaatcgtttatattccacactgtttctcatttaggatttaattggaccgataattcagattttaattaatttggattatttttaattattccaatttttattttcagggcagattaataattaaatgggcttggaattaattcatggacttgaagatgggagtgcgacctcgatcaaattttggcgccgttgccggggatcatcagttctgcaattagggttcttgtgtgtttgtgtgtgttttctgttttgtttgtgttgttctgctttattgttctgttattattgttcattgttgcaattggtagaggaagtaaggtagcattcgagttaagctaaaaatttcactcagataaccaatggaacagtaacctgaattgtgcttacttcctataccagtcctgtttttaagggtgtgcttgctataattgtgcttcaagttttttttgtttcttgcatatttgttgtgctgatcaattctgcaggtcaattagtgcattcaacaagcaatttgtggataccagaggcacgacatgcaggaacagtagcatgaatagtaatgaacagttcccagtttttctgaattatttgtgatttttggttttgatagctagacttgttatttttgcttcaaattttgtgtggtaacttcttttagcctatatttgtgtggaaaaataccaaaagcacctaaagtattccagattctgaaaggcaaaaattttggatccaaatttttgtggaaacttcaaattatcataacttttgatccgaccgtcagaattggacatattatatatgtttttggggtagaaaaaaaagatctagccaacccaggccgccacgtcgcttggccaccattggattttcaaaaaaatcctgttttctattttatttttatttttgaagttttattttcctatttttctaaactttcttaatctgatttatatagttatcctttgaattaggttttgaaatttggtgtgctgtcttttcatgattttagggtgttgctcacaaaatttcagttcatttggacttcgtttgagtatagctctagttttacctctctttatgcttgtctgtcaaatgcttgttatgttgcatgtagtgcatgactagaggcaatccaggagacttacaaccctttgatcctgagatagataggacctaccatagattagttaggcattctaggcaattttcattagattctgtaaccttagatagtgttagcttgaattctgagcattctgcctccaactttaattctgtgcataccatttctgattctgattctgctgatcatattaatactgagaataatatggctcaacctccacctcgtgagaggactcttagggagttggctgcacctgattttacctatgaaagcttgtgcattcaatatcctgatgaggatgtcccatatgttctcaagactggactaatacatttgctgcctaagtttcatggtcatgcaggagaatgtccacataagcatctgaaggaattccatatagtctgttccacaatgaaacctccagatgtccctgaagatcacattttcttagaggcatttccacattcattggagggagtggcaaaggattggttgtattaccttgctcccagatccatcactggttgggatgaccttaagagaatgtttctggagaagttttttcctgcatctaggaccacagccatcaggaaggatatttctgggatcaggcagcttggtggagaaagcttgtatgagtactgggagagatttaaaaagttgtgtgcaagctgtccacaccatcagatttctgagcaactccttctccagtatttttatgaaggccttaacagcatggagaggagtatgattgatgctgccagtggtggagcacttggtgatatgacccctgcagaagctaggcacttgatagaaaagatggcttctaactcccaacagttcagtgcaaggaatgatgccattgttattcgtggagttcatgatgtagctgctaattcttcttcatctgcagcaacgaatttagagggcaaactagatgctttggttaatttagtgactcaacttgctgttaaccaaaagtctacctctgttgccagagtttgtggtgtctgcacttccaatgatcattatactgatgcatgtccctctctgcagcagcatgttagctctgatgcccctcaagcttattctgcaaacatctataacaataggcctcaacaacagcagccgaattatgatctgtccagtaacagatataatcctgggtggagaaatcatcctaatctcagatggtcaaacacccagcagcagcaacagcaacagcaacagcaacagcctccaccatttcaaggttctgctggtccaaccagaccttatgtgcctccaccagtccagcagcagtaccagaggcaacaacaggatgcacctgcaccaccagcccctcaaccttctacttctgaactcttcaaaatttgcaattccagcaagagaccagagcttccatccagagtctgactaactagatggggcagatggctactaaacttaatcaggcacagtcacaaaattcagatagactaccttcccaggctgtgcagaatccgaaaaatgtgagtgccatcacattgaggtcagggaaacagattgacatacctactgcagtgcccttacctccatctataccagttcctacaccaacccctgcatctgtacctatacatgagcaaaatgatgatttaattagtactcaaaaaattcatgcaggtgaaccttcttctagcaccagttctgatgagcagcagccttccatccctcttccatttcctcctagatcgattccaaacaaaaagatggaagaggtggataaggaaatattggagatctttaagaaagtagaggtcaacatacctctgctcgatgccatcaagcacatcccgaaatatgctaaattcttgaaggacttatgcactaataagaggaagaggaagatgacgagaattgagagagtcagcatgggcataaatgtgtcttctatgacaggagaatctattccaaacatgcctgaaaaatgtgaggatccaggtactttctgcataccctgtgttattggtaataataaattcgacaaagccatgtttgatttaggtgcttctataaatgttatgcctctgcccatttttaaatctatgtctcttggtcctttgcaacctacgggtgtggtcatacagttggcaaatagaagcgttgcttaccctacaggtttcattgaggatgtcttagttagggtcggtgaactgatttttccagctgatttctatgtgcttgatatggaggagggattctcccatggttctgttcccctcattttaggcagaccatttttgaaaacagcccgtactaagattgatgtgtatgctggtacattgtctatggagtttggtgatattgttgtccattttaacattcttgatgccatgaaacatctatctgaaaatcattctgttttccatgctgagattcttgatgatgttgttgatgattatgtttctgatttctattcgtcccatgatacgaaacaatgttttctatctgatctttacacttctcttgcatgcatggaatctgaatatgaatccgacaatgattctagctttgattttcaatctgaacatgtgtcccattttgatgcctgctctgagattaattctgatgtattaggtgatgtacctctggatataaactttttagagtcagaatgcactaaccatgtttcaggaagtacacaagaatctgacttgcaggttgaggtacaggctgtggaacccattcttcttccatccttggttccttcctctgatcaacctactcccattccagaattaaaacccttaccgaaaaacctcaagtatgcctacttggagagtgatgagaggttgccagtgatcatttccacttcccttgatactgttcaagaggacaagttgttgcatgttctgaaaaagcataagaaagccatcggctggaccctggcagatatatctggtattagcccatccacttgaatgcatagaatatcattggaggatggagctaaacccgtgagacagccacagagaagactcaacccggtaattctggatgtagtgaagaaggaggtgaccaagcttcttcaggctgggatcatttatcctatctctgacagtcaatgggtgagtccagtccaggtggtcccaaagaagataggcctcactgttgtaaagaatgacaaggatgagcttatcccaaccagagtgcaaaacagttggagagtctacatcgattatcgaaggctgaaccaagcaacacgaaaagatcattttccactgccattcattgaccagatgcttgagcgtctggcaggtaagtctcattactgtttccttgatggtttttctggttattttcaaatccatattgctcctgaggatcaggagaaaaccacattcacctgcccctttgccacttttgcctataggaggatgccttttggcctgtgtaacgcccctagtaccttccagtggtgcatgcttagcatattttctgattttcttgaaaattgcatagaggtgtttatggacgattttactgtatatggatcttcttttgacatatgtttagatagtttggataaagtgcttaatagatgcattgaaactaaccttgttttgaattttgagaaatgccatttcatggtagaacagggaatagttttagggcatgtcatttctagtaagggcatagaggtagatcctgcaaaagtatctgttatttcacatctgccttacccctcttgcgagcgagaggttcgttctttccttggccatgcagggttctacaggcgctttatcagagatttcagcaagaaggcccttccactatccaatctgctgcaaaaagatgtggatttcattttttatgatagttgtaagaaggcgctcgatcaccttaaggaagcattgactactacccctatcctccaggcacctgactggacagttccgtttgaattgatgtgtgatgcatccaattatgcattgggggctgtcctggcacagagagttgataagctgcctagggtgatatattatgcttccaggactttggatgctgcccaagcaaactacaccaccactgagaaagagcttcttgccattgtgtttgctcttgataaatttagatcatatttgcttggttatcctgttattgtttatactgaccatgcagctctaaagtacctgttgaaaaagactgactcaaagcctagattgattagatggatgctcttgctccaagaatttgatttggatatccgtgaccggagtggagctcagaatttggtagcagaccatctcagcagaattgaaggagctgagaataatgatgaggtgttgcccatccaggataattttcttgatgaaaaccttttaagtgtttcttctgtttctgtttctaaccccaccccctggtttgctaatattgtgaattatctagttgcttctgtttttcctcccttagcatcacgagctcaaattgataaattaaagagtgatgctaagcattatatttgggatgacccctatttgtggaagttgtgcagtgaccaggtgattaaaagatgtataccagatcatgagattaattcggtcttgcagttctgtcattcctccgcaccaggtggccatctcggtatacagaggacagctcgcaaggttcttgattgtggtttatactggcctaccatcttcagagatgcggcgaagacctgtagcacttgtgagcagtgtcagagagcaggaggatcccttacatggagacaacagatgcctctgcaacccatgctattctgtgaggtgtttgatgtctgaggtattgatttcatgggcccctttcctgtctcttttggtttttcatatattcttttagttgttgattatgtttcaaaatgggtagaagccagagctactaggactaatgatgctcgggttgtggtagattttgttcgatctaacatattttgcaggtttggaatacccagagccatcattagtgatcaaggcacccatttttgcaatagatccatgcaggctttgctcacgaaatacggggttgtgcatcgagtctctacaccataccatccccaaactaatgggcaagctgaaatttccaaccgagaaatcaagaggatcttagagaaagttgtccagcccaacagaaaggattggagtataagattggacaatgctctttgggctcataggactgcctaaaaagtgcccataggaatgtctccttatcgagttgtctttggtaaggcatgtcatctgcttgtcgagattgagcatcgagcctattgggctgtgaagacctgcaacttttccatggatcaagctggtgaggaaaggaagttgcaactaagtgaattagatgagatccgccttgaagcttatgagaactcaaagttctacaaggagaagaccaagaagttccatgatagcctgatagctaggaaagacttcgaggttggtcagaaagttctcttgtacaattctaggctcggacttatgggtggtaagttacggtcaaagtggattggaccttttgttgttactaatgtttatccttatggtacagttgaaatccaaagtgagtccacaggcaagagcttcaagatcaatggacaccgtcttaaaccattcctcagcaatccttccttgctggatgcagttgtggaggagatatctctgcttgaccctgactcccttccatcttccactacaccttagggagttttctttttctttctcctcttttatttttatcgcacttgtccatatttgttgcattattctgattgctctgaacttttgttgtgccacattggggacaatgtgtaatttaagtgtggggggggggggggagagactgttttttttgttttgtttttgttgttttttttttgttttgtttttgttatcttgtgcatgttttgcatgtttctttttgatttctgggttttgaataggatatttggcactcacttcactcttagataagagttgcttcatactttatgggttggaatccatgtttttctctacttggaaagatgattatgaagtttaaaacgttgatttaactgtgacagatataccctgtgtgaggatttgagccactatctgttctttcatgtgtgttatacctcttgattgcttgcacagttgccttgtcttgactctgtttgatatttcttggttctcatgcatgtttggatatgatgaaggcacttttgttttgataagcctctggccaaataagcttaccctgaatttaattcctttgacaaccctgttgagcctaatttcctttctattgtttgaagctcattacaagccttaagtgaaaaacaattattaccctaaccttagggaactttggagctttggaattgttttgggaataagtgaggggggtgcatgtatatattgttttggatgatgtctctggcttgttggtttactctgatgttcaacttattcttcatgtttctatgcatcgtgttatatcagtaccatatttcatgcaagcgtttcaaaaaaaaaaaaagagagagagaaaaattatagaaatgaaaaaaaataataatttgaagaaaagttgttgtgtttgaagcaaaggaaaaggaatggtgattgaggctgattagagatttttgggtttgtttttgtgcttacttcttacttattcctcattgctcctctagtccctctggtttgcagctacttatcccatattttatcctctcccatgtccttaaccacattacaacctgaaaagaccttttgatccttatgtgcatgtttattgggtgttgattatagagacttgccaagtctatatgtttcttgttttcatgagtgttttgagagtatacaattgcctaaacacttgagagatacagtgtgatacagtgcatctggtgaggttctgttgcttttaattcacctcttaagcggattgattgttttgctaagttttgaatgcttggataaatcccataagtgtgtagtttctctgactctttgtgtgttggaaattgtcaattcctttctcttttcccagttttcatttaggattgtgcagaactgtttattttatggtgtgtcactttctttaaagtctttagaattgttccttgctctatttttggattttgcccaggagtgcaaaaggctaagtgtggggggttttgatgagtcactatttacctttattttctcatctttctgtactcattttaatccctaatttgtgtttaatcgtttatattccacactgtttctcatttaggatttaattggaccgataattcagattttaattaatttggattatttttaattattccaatttttattttcagggcagattaataattaaatgggcttggaattaattcatggacttgaagattgggatgccgcgtcagcattattttccacatcagcattttattttcgttttattttattttcatttttttgggccaaaattgttaggaaaagcccattttcgtttaggtcagacactattatttatagaatactgtgcccatgcagaaggacacaacactattcacgttcagttttcttttagtgttttagtattttcgttttctgttgttttctctatttttagggtttttcgtttctgttggtgattttcgttttcagaatacaattgtgtttcaatttcagtgctatttcgttttctgtttcaagttctaatctcgttttcgttttctgcttttcagtatttaggtttaggttttcgttttcgttttcgtttctgtttaatttcgtttctcttctagtttcgtttaatgttcagtttcgtttcaattcacgtttctgtttctaatttcaatttaatggaaggctaaatcctagggttggaccctaggacagattgcaaaccgtttaatagaggttctctgtatttgcgattcattttctgcttggttctttcttgttgggtttctgttctatatttttcgaattagagtcatgcttaatgattctgatattgattgattcaataatctcaggttgcttaatcctgagagcttgccctgacgaggttcacgtttgcttaattcgtgtaatgaagttttaggttaatcttcgcttagtagattaatctggactgataaggattaagtaggacagattatctttcgtgaaccaatgatattagaggcgcaatctgttctaaggtctgacttgttttaatcactgcaattaattgttatttctgttttattttagatattcttgcatcctgttaaaaaccccccctttacacgtttaatccctaacgaagacaattggtccttgagagacgacctaggagtcacttcctagtactacatttaaactgtattaatttggccgagtacgaccctcgatcaacgtgcgcattagttttcttaaaaagttcctccaattcaacaatactgaaaaaattaacattaattttactaataactgctagaattattatttaacttcctctcttaaaaattcatttaatattagttatctttctcaaataaccataaccactgatagagtttattcctttgtgaacatgaaatagtgggaaataagttatttacattggagttggtgtttgtaacagacttaggtagcaaatgcaagatcccaaaatactaaattctcgattgtccttttaatgaagaccatgagaacattataaacatgttatataatgtggacactaattaatatgctctaaatattggacacattatatttgctcatgcaatccaaagttgacatttggctacacctttgatgcattaagtataatccaaaatggagaaaaaacaaaacaaaagaaagcatccaccacaaacaagttatatgatttgtatatccctagaaaatcttgcaatggaaaaaggacaataacattaatgatacataaagatcaaatcccaaatgcaaaaaatcaatttttgtctcaacgtgatagaggctttgatagaccatttttggcatccttctccagtggcccaacagtaggcaagtcaagtaaatcacactataacatgacaatccactttgtgaataaacttccgaaactttatagcaatctatgccaaaaatagcattaaattttaatctataaaactgagacacaagatcttaagatgccacctaagcgttttgaattctatcctttagccacatggaaattttacacgttagcatatttatatataaccctcttcgttataaacatacaataaaaacaaaacatgacctcatgcgtgagttatacagcagaaccaagttgcaagtaaaaaattgaaatgacaatatatataactatatggttaaaatcatatttacatgcatgtgtagtgttattcattaagaattatagaatatttccatattcttttattttatttgtttctttaaaatataaaccactcattaaaataatatatataaattacttttaaactttgaataaataaataaactaagtcaaagacgtgaaaaaaaattatataaatacacatgaactaacacactatataaagaacttggatattttataagttataaagaacttggatattttataaatacacatcaacctgatcacacacacctatcactcaaatctattcttcacttctcctcatacaggtaatggttgtgttttctctatctaattctaaaccattcagtgtagctagctggactttggagttagaatatgcgtaagacacatggtaatagtacttgccaaagctaaaaaaatagggcaacccaatggcctctacaaaattccatatcagattttaaataatgaaaatattatattatgtgaatagctacttatgcatgcatgcatgcatgagtaattacaaatattttaatgcatgatccaatccattaagatattaattaaagaattaaaatataaagtattatgtgtaaaaaaagttatgagtaatataatttattaagttctaataattttttttattctttcaaggacaagtgcaaaaggaactatataacgacaactagatgatggtacactgggagtatccaatgactcattccacgcttgaaagaaaccatagtgatgataagaatccagctatcatactcgatcattcttatttgccaattgaaaatgaccaaaatttaaaaacaaacaaagctaaaaataggtcattacatgccattttttaattgctaaaataaacaacactaatgtaggataagtggtgtacataaaaaagcttagggaatgcacctgtcattgcaattgagtatagtaaacctagaaacttccaagcctttttaggcagattacatactaaaaactgaatttatatgtgaaaggaactgtaagaactgcaagacccctatagacttttttcatagttgcagccataggatttccttccaagccttcttgcatattgcattgaggaataatgtgaaatcaatcaatctatattgggaccaaaatataacacataacaccactctcgcctctttaatttgagactgttttcaagtattatatatggctggttttttagtgcattgctttgataaattcaaaatagtaacgtgaggccacgacattattcggcaaaaactcataacgtcaattaattgaattgaaaaatgttgaaaagaaaatggtcacctctatgaattacaataaagaagtaaaaaaagaacactctgcaccaacttggtgcaatgtaatgtgttactctaagatgtgccacatttaggaataagaattcaacaattaaaaccagcgccagtgaggaatcaaaaaaacaaaagactatgaaaatcaatttctagaataatcagattaagagctttttgaaattgaattaaatatctgacctcccatgtcagcggccattagaatcccatctttgttggcaactaaggcaaaagaaacataattatgtaagcactctctaatgttgttcaagtagaaaaaaaaactatagacctcatcaagatctatccccaatcaagctttaactagtgaaagaacaagttataattcataaggaattagtaattgtcaaaccatgtttctaagccatgcatgacaatatttagtggttccaaaacaagccctacaaatgcataaaccaaaaacattgagaactgataagctaaaattggattaccacaggcaaatcaccttgaatagcttcactaatctagataggtaccttaaaggtctaccttccaacacgaatccaggcacattttgaatgcattgaattgcttcttcttccattgaataagtaatatatctaaggcaaaaaaaaaaatattcaggaactgctacagttttatattataaagaaaggtataagacataacagtcatgtgttggttatagggggagctatttgaagaatgcaaaggaatcaagccttggttttgagctttcaacatgcattggattccttgaagattgatctgtgttaaatgtgtagagaaaagcaattctggtgatccaagtgcattgcattcatattgtaacaccccaaaattttgggaattacagtcaattactagagtaaaatattaatgagaggcagtagaaaaatttagggcaaaaatgacaaaaacgcccctggacattttgaaaatcaccaaaatgctcctaggtattttagcaagatattttaaggagaaattcttataaatacccttggatgtccaagaatacctttacggcaacaattacagagatactctgaatatttttagaaatgacgattatacccctagggtaagtggtaaaattaccaaaatacccttaggtcaaaaatgaccaagaggacttcagaaatttgtggaaacctcagtattgaataaaatgcttttagaaaataaattatcaacatggtcggtggcagaggaccataaacagtaaattctaggcattctagaaaatattttgaaaagagcttaatatagactagctcgagtatcagaaaactataagaaaaggatgaacataatctatggagtttactcttaattatgggaggaataatgttctaaacgagttagtttagtaaatttaataattcaaggaaagatggaccaataagaagcaagataaaatcactttagcataaaatccactaaacctaggctattccatgtgtaaaatggaaaaacttgtgaagattactcttcaagctagccatcctacatagaacataaagaagaatgtggaaattaaacacttggaagataaggattcaatagccaatgaaaatcaagcaaatggaaagttagtaatgatggcttaagaagatttttaagataaaacttccttttgactcctttggacacggaggaaattatagacattatttcaacaatcccaacggtcaaaagtcagatatgtgggttagaagtacacctttaaaattttaaggaaatccaacggttaacgaagccagaaccaatgtttttctaatacgggttttggaagaaaaactcaagaataaagaatgaagaaaaacccaaatttccctaaacctaagcctactccacgtgcaaaccaagaaaggaggagaattgttgagaaatttcaagaaaaggacacttggaggatgcaaaataactagccaataagagtaaaactaatggaaagtagtcataaatgcttttagacttttcaaaatgccaaaagcttagcaaattcaaggcaccatccgtatgacataaaagccaaatgaaattccctacataaattggaatggcatgtgaagaatgagctataagcaaaggaggtgtagaataatcaagaaacaagacacatggaagctagaaaagcattagccaatgaaggaaaaacatatgtaaagtaagcattaatgacctaagagagatatttgtagatttctcactaaagcatggcatcatacggatgggaaggaaagcaaagaccaaatgaaatgccttacctcttggaattacacgtgaatataagaaaggaggtggaagagaattcaagaaacaagccacttggaagcaagtgaagtattagccaataatcattaaccaagtggaaagtaatccaagatttttaacaaaaataatcttggcttaaggtgaccgtgcaacaaggctttcaaaggcatcttaagaaaacaaatttatataaaggattggtagggggaccgtgcacacaccctagcttatactttgtttcttccaaaatactttcaaagccaaaacaagtagtaaccgtgcaaattccacccaaaactactccaaagcctttctattttgttccttttctaattcaccttttacctagaacaaaaaccaaggtttatatgcttggaagtccacgtgaggatttaggagcattaggagcaaggatgattcaatttcaaaggaggaagataaggtatgggggagtttatgataacttagtttgaatattattccttgttttatttgattaagtcttgtattctaagtgtttgatgaaatgtctcaaagaaataaagattgctaggaacatgattacttggataaatgacttggttttaggttaaagaatgattgatgtataaataattagagcttaacttaatgaatgagtcaattataggtattttagaagaaaaacaaatattttactaaaattaaagtagttatgttctactaaaatttataagttccattaaaagtgttttggaaattcttgaaatatgtctagtttatgctaggaattatgttggaaccatgtttatttattctagaatttattgaattttaggaaatttaagatttaagtagttttctttacagaattttatgatttaaagcttgcacactatgtgtttgataatatgtcacaatgaacaaaatatgtttaataatgttggcttaaatccttgcttgttgagttgaattatatttgtgtggttggttgctttaataaaagttatgtattatttcatgtgttgttgagggtttctcatgtgttgctgagtgtttctatggaattttccatgtaaactatgatttatctgtgaggaatttatgaagttgaaatatggttgttatgtaaagcttgatatgatgatttaaaagaagtttgatttgttgtttaaaagtatatgctctgaatgatcaaagatgttgagctttgtgatgtgttccactagagtgggtggaactatctgatatgagattttgagaaataaaataaatggtgaaaagtaaataagaaataaaaacaaatcatggcatagttcatatgcatttgacccctcagagtggagggaggtttcactagagtgggtgaaactatttttgactatgacccctcaaagtggagggaggtttcactagagtgggtgaaactatgttgattatggtaccattttatgataagctgggatctcagtcatgcatcatataaaaagataagcatgcatctcatgcatcacatgatgggtatgtatgatattttgtatatttggatctgttgtgtggtcttgttataaataaggctttattcatctgtgtttatatatgttttattcaaaatatgtttatcatatacttacccctatttgtgtctgtggttgacgcctgtgatgaccccaatttatttgggtgagcagggaaacagtgaagcataagctatggatgatattgaagaagatgtgatgaggaagattgatgaattgtaattttgagtttggtgtgtattttgtgtctgtttaacttgtattaaaactagacagtctgtatatttttggacgtgtatttggactgtattatggattgtatctattattcacaattgaagcgcagtgggggagaagcgtttacgttacgaacgaaccatgaaacttgcaagcaaagcgaaaaatttttttatgtaaaatttataaataacatgattctaatacaaagtggacacgagatttcacctaaaatcaatcaagcacgagagagtaaagagaggcgttacacatatcattcaataatttaattaatttgattaataaaaatcacaaggctttggcaaaatgaccaagtttttgatttgaatcaaaggtttttggaaaaatggtttttgtactgacttaatcgattacattaaaggtataatcgattattttgttcttagcctattctggaaaagttttcaagaacaatgtaatcgattacctattggaataatcgattatttgacctttgttttcatataaactgccttgatgaatattttaatcgattataaatagctagtaatcgattaccaaagtgtagtaatcgattacacaggtttaattgaaaaatccatctttctgtcttaatcgattaccaaatttagtaatcgattacactatatgttaatgtttacaagatctgctgctttaattgattaccaaatatagtaatcgattacttagttcaatatgtttttaaagcttcctggtttaatcgattaccagagttcgtaatcgattacacaatgtattttgattttttgcagcttcctgtcttaatcgattacaagacagaataatcgattattttgctcattgctcatgtccagaaattatgttgaacactttaatcgattacatgagttaaataatcgattatatggcgcgtttaatcgattactgacagttacaaaagtttgttataaatagaaccctggctcagcttgttttgcaacttgatcaattcgtattctgagcacacacaagctttctaaacgctttcaaagtgatttttctgggttctatgagttcttgcttcaactaaaacttttgtggatttttgagtgattctttaaagcaagaagtctctttcaaaggttaaggaagaagatgttctgagtttgtttttgtctttcaacccaaattgttcattcatatgcatgtcattcattggatcatcaggttgtttctttccttaactcattgattgtaattatgtttacaaattttgttgtaattggctattgtaattgggttcttctagcttgggactagagaagggttctctagcttaaagatcagagtagtgttctctggatctttctccttggaagtctaataggttttggatttctgttctttatctagggttgataaaggggaggttcttgtaaaagcttgtaagaatattttataatagtggaactctaattcagtgtgaattagaagaaactggatgtagcttcatgttgttgaagtgaaccagtataaattgcttgtgttattatttctatatctctattctcatcttattcattgtctttaattctttgaatcacattcattgttcaacaagttctgttttgatctattgaattcttgactgagttatttgattgagtaaaaagtttcttggttttaaaagtgataaagatcctgaaactctgatttgaatttgattttaaagtaccaaggttcaaccaattcaccccccctcttggttgttgtgaagtattcctatttttttcaattggcatcaagagctggttcttgagagttattcaagatcactagttttctttaaaaagaaaaatgaatacctcacaaataaccttcaaggaatgtgcttctttaaatagacctcctatgtttgaaggggaacatttcagtttttggaaaaatagaatgaaaatctttattcaatcaaatgacccaggtgcttggaatgctatagaaaagggtcctttcattcaaaagaaaactgttgccaatgaattgattcccaaagaatgggatgagatgacagaagctgaacaaaaggttgttcaatatgattttaaagctaaaaatatgatcacctctgcactttcctctgatgaatttttcagaacagtgagatgcaagaatgcaaaagaaatgtgggagatgctggagattactcatgaaggaattgaagaagttacgagatcaagaaagcatgctttgatccatgagtatgagatgttcaagatgaacaccaatgaaagcatttctcagctgcagacaagattcactcatattgtaaaccttctattgggtcttgggaagatctttgatactgaagaattaaacatcaagatcttgaagtgtctaacaaggccttggaaaccaaaggtgacaacaattaaggaatccaaggatctatcaaagatgtccatggctgcactatttggtaagttacttgaatatgagcttgaaatatctcaactaacttgtaattaagatgcagaaaagaaaaacagaagcattgcattaaaatctgcaacttcaaaagctaaaaagaaggaagaaacaagtgacgaggatgaagaggacaacatgaacttagttgttagaaaattcaacaagttcttgaggaaaaataagagcaaaaggttcactaaaaccagtaagaacaacaacaacaaataaacttcaagaaaataaagacagaatttaaaaacactggtctgcctcctaggagcgcttctttaacgtcgtattagctagacgcctttgttatggttttggctcccagcaattggacaattttgatgagcccttagctttttttatttttcctccaatatttttatctagtttcttttctttttcagagagcatagatttattgataactggtttctttgaatttcctgcaaggaaaacatgtttagcatatggaggtactgcgtttacctttatctgtgattcttgatttgtcacttcctttgacaattcctcaaagaatgattgttggtaaggaatttcctttaaagcatttagttgttggaaatgatctaaactttctttttcttcttcggattcactcatctcctctaatgcttcatctaaataatcttttccttgagccaacttcttggagtcagaaatccctccattcaagacatccactctaaaacatcctcttggttctcttgaattatcatgtgtttttgctgaagagggtccacttctgtgctcagacaattgctttgcaagctgtccaacctgaacctcaagattttttatggaagcctcagtattcttttgatttgaaatggacatctgcataaactgagttagagtatcttccatttttgatattctatcaggttgagcttcttcttgttgttgaaccctatttgaagaacctacatgagagttgttagagggacatgcaaaagaagagttagtggaaccataatatgcattttcatattgctgcttccagccataagaacttggaccatctttgtagccttgataatgtccttggaagttctgttgaggtctggtctgattctgcatataataagcctgctcttcttgttggcaatcaccatttagttgaggaagttggcctatttgtttggtcaaggcctctatttgttgagtcaagagcttgttttgagctagaattgcattttgagtatccagctccattatacctttcctttgaatccgagatctatcatgatgagattgataatcactggctgctatggagtcaatgatcataattgcttcctctggactctttgacatcatggtacctccagaagaggcatcaagaatcatctttgtttgaggtctcaaaccactgtagaaaatatgtacctgtgcaatatcatcaaagttatggtttggacacctatgcagtaaagatttgaatctctcccatgtttcacagagaggttcattatacccttgggaaaaagcagcaattgctgactttgcatttatgaatctagatggaggaaagaatctggcagtaaatttctcctccacttcttcccaagtgctaagacttttgttaggttgggattgaagccatacctttgccttacctgtcaaggagaacggaaaatctctaagataaacagcttcaacatctgcatcagaggctcccatggtactgcacagctccatgaaggtggacaaatgagtgtatggatcttcatgatctagtctggcaaaaggatgtgatccaattagactgagcaatgcagacttcaattccacaacttttttactgaaaggaggaatgactatgctattgtaatgctttggtctttgatgatacgcataatcacccagagtcctccttggtggtctattttcctctcctcctctatcagccatattttataggtagctttactagtgatggagaatcaaaatagaagatttactcggtagctttttggttgtctgtttcgtttttcctttatggtcttggtaatttctaaattaatatcgatgtagttgcaagaaatttacctcaaaaaggaaaaagaacaaacttgcaataatttgtaagtatcgatgttagggagagtaaaataaaacagaagataatttatacaaaattaaaaataacaaaagcaaagaaaagtcctattcaactgagaaattaaatttgaaagaactgagcgatcgactcaagtccccagcaacgacgccagaaacttgttaggtatttccacggcaagcgtaccattctatcgttgtaagtttcgaatttataagatcgtctccacagggacttgagcttgctcagttaatccaaatagaattaaatagtttaatagatatgtacaagtaggtcgaacgatatttcatttgttgatgcaagtaaagtaaaataactgaacttaacaaaaatgaaaatatatttatgagaaagtgggattggatttcatcattcttaacattctatattcaattaatatttaccacacataaatcatcgtctattcttattgttgcatactaagttaccttgaatcgatccctcgcattcaagttcaaaggatattttaccgcatatcgatccctcgcatatttaagtaaataccccagcgttaagaactataatcgcgtgcttttatgcaatcaaaacgttatgccctattcctagcaacgtaacgtaatgagtaaattcattcagttcaaaccctaagattactttccagtctcacttaggatttaagttcgtgatactagtgatcaagtaggatcaagcattaagcgcagaatgaaactaccaataagaaatagaacgattcatgcatgaatattaaaagaagtatagggttaagaagattacatccaacctctaagaagctagccaagcatggagagaacctcctctcgaaaagagttgctgaacgttcccatcctcgcttctctccggcagagtttccacgttaatcctcacttctctcactttcttaacctacttaatactaatatttaagagcctaacacctaagaacaagcttaaagcaagaaagggaggaaaagctctccaaaaagcatgccaaagctctccaaaccgtggcctatttatagattttgggcaccagtatgcttcactcgcccaggcgaccatttttgcctgtaggagctcgcctggacgagcttatctgatctcctagggacttgaagctggcttgggcaaccaaaatgcacctgggaggctggcctgggcgagttaaaagcttaatcaagaagaaacctttgggctttgtgatttttgggcctggtttgcttgtggaacttcccatgcttgataagtacaccttccttgcttgttttgatcttccagaaacctcggaaatccctggaatctatcaaatacacaacatgatttggattaatcttccgaaacactttaagcataagaataaggtgctaattaactaggtttagggaaatttataagctaaatgaaagaaatcaaaagataagtgccaatattttatcataaatttaactgaaatgtggcacttatcagtgctttgaactgtgtaccattgtcagtaatgatagcatagggtagaccgtatttgcatacgagatgtttccaggtgaaggtatcaacttcactggctgtaatctcttgtagtggctttgcctcgatccacttggtgaagtagttgattgccactagcaagaactggaccatcctgagagctctagggaatttgttgatttcaattgaagacaagcatcaatgaacaagattcaagcttcaaggagttttgagctttccacatgaccaaaggctaaagaatcatgggaagctttgaagaactaatttggttagttgtaaaagggagttatgatctgataatccaagtgtgcatttcatgtcattcattattcatacatctaggattgttagattacatgaattgatcaaaggcagcacagaaaaggttaagaattttaggaaaaaccaagatttactgaagtaatcgattacatacttattggaatcgattattttgttcttcgtgcctttgaaaaatgcatcattcggtcttaatcgattacaacatttggtaatcgattacaagcctgccttgaaaaagcctgacctactggagtaatcgattacatatcggtttaatcgattatatagttcaaatcagaaaatagggtcactctggcttaatcgattacaacaattggtaattgattacatagtacattttacagaaacaggtcactctggcttaatcgattacgtatcggaataatcgattatttagttcataagccaaaattcagaaagcctcgggaatattttaatcgattacatcttgaattaatcgattacaaatggtaaataagcgattacaggagcgtgtttaatcgattattatcagtaaaaatctgttatagaaaggacctctcagactgaggttcatagctttcacaattattgagttttacgaatcctaaggcattcatacacgctctgagctttcattagtgaatttttctctgttctaaacacattgacttcaccaaatccatatgggttgttgaatcaagaaggtgaagtctcatcattcattcaaggcataaggaaaggtttgcatatgtttgtgtgatcagtcaatcaacctgagtttcattcactttgcattcattcttggattatcaggtgatatctttccttgtcctttgttgatgtaaactgttctttgaattctttcaagtttttgtttattctaaaatggatttcttgcaaatgtagagatagtgtttctctagtttttgctgagtagggttcttggcaaggggtttggtctctaagagtctaatagggttttagacttctaaactttatctagggttgataaagagagacttgtataattgcttgtaagaatattttgcaatagtggaactctactctagtgttgagtagaagaaactggatgtagccccataggttttgaggtgaaccagtataaatcatttgtcttgatttatttttaacattttcggttatcttaggaattaattctgttgtgtgaatttgtctgggtggtgtttcaagtcttggattgatcattggataaagtttgttcaagtgtttttgtgataaagatccaaagggccataaactctgatttgtttttgaaaattctgtttttcagtgagaaaattttattttaccaagactaaccaattcaccccccctcttggttaattgagaagtgttccttatgttccacaattggcatcaagagctaggtcttgtaagatactcaagatcactgcatttttacaaaatgaacacctcacaaataacttttaaggaaggagcatccttaaacagacctcctttgtttgagggggagcatttcagcttttggaaaaatagaatgaaaatctttatccaatccaatgatccaggagcttggaatgctattgagaaaggtcctagagtgcctattaaaatggtagataacaacatgattcccaaagattgggatgaaatgaatgatgatgagaaaagaattggtcagtatgattttaaagcaaagaatatgataacctctgctctatcttctgatgaatttttcagaaccgttcggtgtacaagtgccaaggagatgtgggagatgctagaaaaatcacccatgaagggactgaggaagtaagaaggtcaagaaagcattccttgattcatgaatataaaatgttcaagatgaatcagaatgagagtatttctcagcttcaaacaaggttcattcacattgtgaatcacctcttgggacttggcaaaacctttgatgctgaagaactcaacatcaagattctgaaatgtctcactagagcttggcaacccaaagtaacagccatcaaggaatccaaagatctatccaagatgacaatggctgcactttttggtaagttgctagaatatgaatttgaattgtctcaactaacatttggagaaaatgcagaaaagaaaagcaagggattagcattgaaatctacagcaaccaaggttgagaaagatgaagaatctagtgaagaggaggaagatgaaagcatgaacttgattgtaaagaagttcagcaaattcatgaagaagaacaagggtagaaaatttgcaagaaacaacaagaacaattcagcaaacaacaatactagtgatcgaggtcgtactcaatcaaattattacggtttaaatgtagtactaggaagtgactcctaggtcgtctctcaaggatcaattgtctgcgttagggattggaaacgtgtattgagggggtttttggcagaatgcgggaatctaaattaaaacagaaataacaactaattgcagtgattaaaaacaagtcagacccttagaacagattgcgcctctaatatccttggttcacaaaagataatctgtcctgcttaatcctcatcagtccagattaatcaactaagcgaagattaacctaaaacttcattacacgaattaagcaaacgtgaacctcgtcagggcaagctctcaggattaagcaaactgagattactgaatcaatcaatatcagaatcattaagcatggctctaattcgaaaaatacagaacagaaaccccaataaggaagaatcaagcagaaaatgaattgcaattatagaacctccattaaagggcttgcaatctgtcctagggtccaaccctaggatttagccttccattaattcgaaattaacaacagaaacgtgaattgaaacgaaactgaacattaaacgaaattcaaatgcaaaaatgaaattaaacagaaacgaaaacgtaaacctaaatctaaatactgaaagcagaaagcagaaaatgaaaacgagattagaagatgaagcagaaacgaaattaaacactaaaattgaaacgcagttgtattctgaaaacagaatatctagacagaacgaaaaaccctaaaaacagagaaaagcagaaacgaaaatgctaaaaaaccctaaaaacgtgaatagtctgtagtgttgtagacgaaaattagtgtcttggctcgtgcctctgcatgggcacaatattcgaaatatatagagtgactgacctaaacgaaaatgggcttttcctaacagttttgacccaaaaaacgaaaataaaatgctgatgccacatcccaatattcaagtccatgcattaattccaagcccatttaattattaatctaccctgaaaataaaaattggaataattaaacttaaaataatccacattaattaaaatctgaattatcggtccaattaaatcctaaatgagaaacagtgcagaatatgaacatttaaacacaaattagggattaaaatgagtacagaaagatgagaaaataaaggtaaatagtgactcatcaactagcagctccaagaaaatggacaacagctatacttgttttgaatgtggcaaacctggtcacatcaagtccgaatgctccatttacttgaagaaacagcagcaagacagcaagggaaggaaggaagctaagcctagaaaagcttacattgcctgggaagaaaatgactcctctacctctgaatcatctgctgatatggaagaagcaaacatgtgtctaacctcaatcatccatgcagaagatgatgatttgctgaatgaagatgaagaggtaaattttgaacttgaacatgttgttttagcatttcaagagatgcacaaagaagcaaaaaagctggctaaatctaacatcaagcttaaaaagaacatggaagatcatcttgccaaaataatggagttggaaactgaaatttgtaacttgaagaaggagaatgaaaatctgacttctagttacaaatcaagtggatgtatatgtacctcttcctctacatcaagtgacaagtatgaagtgttgcaaaaagtatttgatgaatatagaatcaatcaagaagaaaaatatttgcaacaagtctcaaagaaccaagaattgattgacatcctggaaaaactcaacaagggaaaatgtgatttagaagaaatattgagtgcctaaaaacagtatggagacacctctggtttgggttataaaaagagctttaaaaatgtgcaaaagaccaaatttgtactcccaaaacagaagcaaaagaaaagggcaaaagtcaatcaaaagtggttctctagaaaaagatataatgttgtaacttgtcactattgcatggaaagaggccatacagcttttcattgttttgcaagaaggttctatgtcccaaatggtgaatgcatttgggtagaaaagaaaaagaaaacagctaacccacttggacccataagtaaatgggtacctattcctttgaagtaatttgtttcttttgtaggtgtgtcttagagcaagctcttctctttggtatcttgatagtggatgctcaagacacatgacgggtgacatgtccttgctcaagaatctcacaattaaagaagggggctttgtcacttatggagataataacaaaggaaagattatgggtgaagggagcattggtgacagcttaaacaccaaaatcagcaatgtgctttatgttgaagggctgaaacacaacttgcttagcattagccaattatgtgacaaaggctacaagatatccttcaatcaagattgttgtttgatttgtgataacaaaagtgataaggtaattcatgtaggcaagaggaaaggtaatatgtatttactctctattgaccatgctttatttcacaaaacctcatgtttattaagtaagatagatgaaacatggctgtggcataggagagctagtcacataaatatgcatcatatgaacaagcttgtcaagaaagacttagtcattggtttgcctaaactcaaatttgagaaagacaaattgtgtgatgcttgtcaaaaggggaaacaaacaaaaatctcttttcaaagcaaaaacattgtttccacctttagaccacttgagcttttacacatggatttgtttggtccttcaaaaactatgagtttaggaggcaattactatggactagttatagttgatgatttctctagattcacttggactttgtttttgaaatctaagagtgatgctttccattcctttcgaaaattagccaaagttattcaaaatgaaaaagagtgtaaaattgtttcaattagaagtgatcatgatggagaattccaaaatgaagattttgaaaaattctgtgaagaaaatggaatcaatcataatttttcagctccaagaacacctcaacaaagtgatgctgtggagaggaaaaatagatcacttgaggaaggtgctaggacacttctaaatgaaacaaatttacccaaatatttttgggctgatgctgtacatacagtgtattatactttaaatagacttctcataagacctattttgaagaaaaccccttatgagttgtataatggaagaaagcctaatgtttctcacttaagaacctttggctgtaaatgctttattttgaacaatggaaaggaatcacttaggaagtttgatgcaaaagctgatgaagctatcttccttggatattcattacaaagcaaagcatatagagtcttcaataaaagaaccatgtgcattgaggaatctgtccatgtaatttgtgatgaatctaactcctcaaaagaggaaaaagcttgtgatgatgatgcagaaaatgaagagcagaatattcaattggaaaagatgtctatgaatgagaaaaatgaaccaagagctgaagaaggttcatcaactccaaaacaattgcctaaggagtggagaaccactagagatctttcactagacaacattattggtgaagtatcaaagggagtctctactagatcctcaattagaaatttgtgttttgatatggcttttgtttctcaaattgaaccaaaagatatcaatcatgctttgcaagatgaacattggatgcatgccatgcatgaagaattaaatcaatttaaaagaaatgaagtttgggaacttgtccctaaacctccatccattaggcctattggtaccaaatgggtttttagaaacaagctggatgaaaatggaatcatagttagaaataaagctagattggttgctaaaggttacaaccaagaggaaggcattgactatgagaaaacttatgctccaatcgcaaggttagaagctattaggctgctacttgcttatgcatgtatcatgggttttaagctttttcaattgcatgtgaaaagtgcatttttaaatggctatattgaggaggatatttatgttgaacaacctccaggattttctgatttccagcatccaaatcatgttttcaaacttaagaaagccctctatggtcttaaacaagcacttagatcatggtatgaaaggttgagtaagtttttacttgatcaatcttttataaggggcaatgttgacaaaaccttgttcattaagaagcaaaagaatgatatcttgctaattcaaatctatgttgatgatattatttttggttcaactaatccaaagctttgcaaagaattttctgcagctatgcaacaagaatttgagatgtctatgatgggagagctgacattcttcctaggattacaagtcaagcaattgaagaatggaactttccttagtcaatccaagtattgccttgaagtaatcaagaagtttgaaatggataaaagcaaagatgcagcaacaccaatggccacttcaacctatcttgattcaaatgagaaaggaaagaaagtagatgaatccaaatatagaggaatgattggatcattactctatatcacagctagtagaccgggtataatgctaagtgtttgtttgtgtgcaagatatcaagcaaacccaaaggagtctcacctttcagctgtgaaaagaatcatcaagtatctgtaaatataattggttattctgatttagattttgcaggatgtaaacttgatagaaaaagcactagtggaacctgccatctccttggaagttcacttatttcttggcattgcaagaagcaagcttatgtagctctttccactgcagaagttgagtatatatcaactggtagctgctgtgctcagagtatttggctcaagcaacaactaaaagactatggagttgagctaaaggagattcctttgctgtgtgacaacacaagtgccattaacatctctaagaatcctgtgatgcattcaaggatcaagcatattgagattagacatcattttattagagaccatgtgcaaaaaggtaacatcaaggtagaatttattgacacacatcgtcaacttgctgatatttttacaaaacctctgcctaaggatcgattttacacacttagaaacatgctaggaatacttgatgagaataacattatctagcctgttttgattgtgtttgtgtgctgtttgaaagccaataaatatgtgattgttttagtgattgaatcaatttcgaaaaagctgctaaactgctctattttttatgaatgttctgtgataatcgattacaccacgggttaattgattaatttcactaaaactcaagctcagaaaggaatttgctatcatgtaatcgactacacttatatggtaatcgattattcttcacatttctagaaatcatacacttcgggaataatcgattacaaagcgggataatcgattacatatggcctgttacatgacacatgagtcattgctctgattaaattgattatatacagaaagaatcgattacaaagcttcttcaacctctgatcacttgaattataatcgatttcataacaaaattaatcgattatcatgtttattaacagaaaacacattgcactagaataatcgattactttacgaaataatcgattattcgtgctgttgcctgaactttgactgattttatggattcactaaacggctaaatcaatgcaaaacagttttcaatgttattgaaccgtcccaatggctattgcatttaagaattatggtcgttaggagcgtaaatcatgcttataaataaagataaaaagccttaaggatttgcatcacaagccttctctacctttggtatctctcatgatttagaagatggatactatacctgagccttgttataaaagagttagaaaatctaaaaagaagcctgtgatatcatcctttcaagaggactttaaggctgagatcatgctgatgcttcaagaggatttcaaagctaaatattatgaagcattgcataaaataagaggctagatgttatccaaacaatcctgaacaatcaagtatctgaagaaatccaggatagactagcattagattttggctgatctactgtctaggactagttagatttagattttgtctgatctgctttctagaactagctagatttggattttgccagatttattttctatatgtaatggatttagatttagtgtttgtctgatctgctttctagaattagctagatttggattttgccagatctattttctatatgtaatagattcagaattaagggttgtctaatctgctttctaatgtaatgaacaaattatgttctgtttctatttctatttgtgttcagtacttaaaattccattatgaaattgccccatatgtttttctattaagttacgcaatgcaattcagatttcaaaatccgtcgtgcttctattgttttttgtcttttaacaagccaaatagggggataatgattaagggacatctctgtttgcccctgttttttgttcaaaatatttggcaaagatttaaattgcatatgtgctggaatttagggggacgttaagtgaaaattgaaaccaataaattaatattgtgctaatttgaaatactcatggagaatgtatacataaacacttggtctttggcaaaggttgtttaaattttcaggtataaaggtcatctataaaagctctgaaataacatggatgttcatggaatttcccaaaggaactgcacttaatcaaattaaagatttggcatgtttaaagccaaaaagggggagattgttgatttcaattgaagacaagcatcaatgaacaagattcaagcttcaaggagttttgagctttcaacatgaccaaaggctaaagaatcatgggaagctttgaagaactaatttgattaattgtaaaagggagttatgatctgataatccaagtgtgcatttcatgtcattcattattcatacatctaggattgttagattacatgaattgatcaaaggcagcacataaaaggttaagaactttaggaaaaaccaagatttactgaagtaatcgattacatacttattggaatcgattattttgttcttcgtgcctttgaaaaacaaatcaagaacaaggtaatcgattacagattgaattaatcgattacttaggctaaaatatgaaaaatgcatcattcggtcttaatcgattacaacatttggtaatcgattacaagcctaccttgaaaaagcctgacctactggagtaatcgattacatatcggtttaatcgattatatagttcaaatcagaaaatagggtcactctggcttaatcgattacaacaattggtaatcgattacatagtacattttacagaaacaggtcactctaacttaatcgattacgtatcggaataatcgattatttagttcataagccaaaatttagaaagcctcaggaatattttaatcgattacatcttgaattaatcgattacaaatggtaaataagcgattacaggagcgtgtttaatcgattattatcagtaaaaatctgttataaaaaggacctctcagactgaggttcatagctttcacaattattgagttttacgaatcctaaggcattcatacacgctctgagctttcattagtgaatttttctctgttctaaacacattgacttcaccaaatccatatgggttgttgaatcaagaaggtgaagtctcatcattcattcaaggcataaggaaaggtttgcatatgtttgtgtgatcagtcaatcaacctgagtttcattcactttgcattcattcttggattatcaggtgatatctttccttgtcctttgttgatgtaaactgttctttgaattctttcaagtttttgtttattctaaaatggatttcttgcaagtgtagagatagtgtttctctagtttttgctgagtagggttcttggcaaggggtttggtctctaagagtctaatagggttttagacttctgaactttatctagggttgataaagagagacttgtataattgcttgtaagaatatttttcaatagtggaactctactctagtgttgagtagaagaaactggatgtagcctcataggttttgaggtgaaccagtataaatcatttgtcttgatttatttttaacattttcggttatcctaggaattaattctgttgtgtgaatttgtctgggtggtgtttcaagtcttggattgatcattggataaagtttgttcaagtgtttttgtgataaagatccaaagggccataaactctgatttgtttttgaaaattatgtttttcagtgagaaaattttattttaccaagactaaccaattcaccccccctcttggttaattgagaagtgttccttattttacacagaattgtcccaagatgtccatgccccatatagcgaagggctagggagaggagatggtgtgtaggttgtcggggaatccgtgggatatccgcaaactcttaacactttttacacctccgtgtgaattggaaggcgttcgtcttgagtgttggctagtagtaccctgctcgtactaccttggtggctaaggatcgtcctcctgtatggagtccacagatcccttcatgaagttcccttaggacatagtctgcctgtgagttgtccaggcatttgagcagaggtgctgtcaatcctcttttgaataactcactgtcaatgatgacatagtagctagccttccgctttagacgtcgggcctcattttcatctgctgggagtgttgatagagtgcttttagttaaatttttgtctatcattcttagcctatttgacctcttttggacttttattttcccattctaattcagttttgtcttaggcaagtaagtgggtttaattgctaattgtagcgtatttttggatttttgctcaattaacgtatctgacttatgcagggcctatagagtgatacggaacttcgaatggagcgttctagaagtccctgaaaagataacgaaaagatctacaagtttgctagaaataacccaaggccaattctatcatttgcagtgtcattttaagcttcgaagttagcacctttgcacttgtaattttgggctatgaattagacttttagtggtgtaaatagtaaataattagattgttgggtttgtttatggctcattctattttcagaacttagtcactatatgtattagtgactttagtgaaacttggacaacacttcacaattcaataaacatgttttatatttcttttctttagtttttagaatcaaaagcttgttcttcattttctctcatttgttcttcattgttcttcatcttcttcatttccattttgctattcttccatttttctgcacttacttcatggggctttccttggtgatcatcatggaaggctaaatcattaatcaatccaaggatctaactcaagcaagagaagaattggagttccggttcggtatttcagattctacttgaatattcaccttcttcttcaatttctattatgatttcatgattatgaatgcatttaggattgaaagtaagttaggattatagattcatgtcctaatttcaaatgataatcataagattaattgaatgatagttcagttagggttgtcgtttcaattaatttaggagtaaaatcgattgaactgcttctattgagattgaatgaatgttcatgatagaatcaatttatgggaatgataatgattcgaatagcttgggttgatgaattggattgatgctttctaatctgttttactttactccttgataatcttattaatttctgcattgttctttacttttagtttgtataaaatcatattttatataatttcttttgtttctttatttaattatgataaatataaatataaatattgatatatgcagcattaggggtggaaatgggcctgcctatcaagggcctttggtctggcctatttaaagcctgacttgacctgacttgtttattataaagaccagactaaggcttcttgaaaaagcctgtttaaataaaaaggtcggactcaagctttaaaaaaagtctgttaggcctattagactgacctatttaatatatatatatatatattaaaacttaaaaataatatatttattttttaaaaaatattttttctcattataaaggtggatgatcaatcactttaacaaatcaccttgaaaatctcataaatgattaagataaacatatctataacttataggattttgataatttataagaacaatatatctattatgttatttttatttactcagactttatatataggctttcaggccgggtcatgcctttatgcaaattaggctcagaccttaataacttatttttaacaagtaataagcaggattagacatgatgataatgatacggatcagattcagacctatcaaagccttacctgacctattttcaccccttatccagcatagctcacatctccagcacacagagatacatagacatagtggcagagtgaactgacttgtgtgtttcagtttatagtcacaccacgccacaacaccgacatcttctttaacggttacttttctgttctgagaaagaaaatagagaataaaaaataaaaacagagcctttctgatcagtgagggattggagagtttcgtcatccttgttgtgctctgctcagatggattacaacaattacccgtaaatctttctctctttgtttcttattttttatttattattttggttgtgattggtatggctaatggattttaagtgggtcttgatttttctttcttcttgtgtttttttttatttttttattttatgaatttagttctgggtgattttgtttttggacggaagggttttttttttcatttatgtttatctattttcggaggtaattttcttcgagacaccctctgacactaaataaatatgggcacctctcttccggcaagaattcgaaccttggttcgtcacattgaatgatttggggggtgtttattttggtgttgcaaggtacattttgttttgattgctggaatcaggtgctggaatctaatttattatggttgattgttttttttttcttttttctggtgtggttttgatttgttatagagattgttagatttttttgggttatggataaagaatgtaggatttgggatgttgccttgtttgattagattggtgggtcatcttttttaccctttttccctcttgatgttttttttcctttttgccccttttctcttttctgcttattctgttattccttggctgatataattaatcaatagatggaagaaaaactgcttaagtactgactgtgatttctaatgtataatctaattgttctgtttttaactttttgtttggtggtaattgctttagtttaccatgattgtcaatcttccattgtctatggtactaattatgacgtgtagaaacattgtttggggactgagttaatcttatgcattgtagaatgtgcttttacttggttcctgaatgggggggcttcttttgtgttttccatcgcttgttaacttttcggtctgttggttaatctttgcgaatgtcgcatcacaagttcacaacaatggtatttacttgtctgcccttattcttagtggtgctagggagccgtgggattggcatgggaagaatattagtctcggaaagactgctgattttggtaagtcccaccgtaacttaagtaacctctacctaccccatgcctgaggaaaatgtgttgttttgagcagaaatttcggaagagctgtggaatgatgtccctcaaaatgaagaagatctttcatacatgttagatgatgaaacaaccccagttaaggcttgtagtgatttggaatataatgtcagtaatgctggtaagacagttctctggcttgcacctttcttaacattgtcttgactatgtgcaacttgatcaattgtcttttttcctttgttgttgttattattatttatccttttctaattcaaacaatggttcattcttagatccaaataatatacaaaaggaacccgaggaatgtagggagacttattcacaagccaagaggcggcggatgctacagttcaacagccaagataacgatcgatctctatccaatgaagagatgtctttgtcatatttaaaaaatgtcagtggttgtagcactttttttggattaacttttcacattcgtaatggttcaaacggctttaagaaatttagatttgttcttattgtgcaaaacttgcctacattttgaacttttcctcaacttaattacatactgatattaatattttattcatggttgaaaaaggaataccgaatgcatattatcttcaatgccttgacttaaagtcgcttatccctgttctttctgttagagattttttctggtgtaacgacttcaaaaccatccttggtgaaatttggaaaatgattttaccattttgttttgttacctccttccactgattcagctgtgaattgagacttattcactattccactgtacgtatactgtaagcacatgatggctcaatttcaacatagaatactgttaacttaaacatttggggtgactgttaaccctatgtggtaccagagtttgttaaaaatttgtttgcttgaaatctttttatcttgtttctagtaatcattatttaaggtagatttctgtttttcgtgaatcctctttgtgactctgttggcttgatcaacattcttgattcttttcttgtggatttgacttaatttatgactgttaattcattacatatacaggggaaggaagacccagttaaggagatttttccagaggtttcacaatgggtatcgggggcatcaggtttaccttttgcaggattctgctttatgttttactcagatatcttctgtaatttatttctattttaattctgatgtttccccaatcattgtagattacactataggaaatgcatctgcatctgattttgtggaccttgaatcaactgaatcatggcttgcggattactttaatgatgctgagatggatttcagtccagaggaattgtatgtttctttggaccattcatttgttgtggaaatctggctttacaaaataacctgacaattatgttatttgactcaggaatttttcagtggcagacggtgttcaaattgatggtacaggtaggttacattgttgtccatccactattgtctgctaattttgtttcttccttcattctttacttttccttctatgtgttgggttttattcaaaatatttttccctcctgcagaggttagttccatcacatcatcacataaacaaaatgtggttcaacaaacgcatgtccctcgaaccactcgtaatattatcttcaaaggtttgacttttttcttgacatagtatctctttaggtttaactgtaccaagtatttacttagtttctcttgtatcctatatgatatatgatatataggccaatatgggttggcacaagtggtcaaggatccagagttatttctcatcctttccatggacgtgcatttgatttcctctaatgcccctaaaatcctgttgggtgggtaactcatcacccttagcacccaagggctagctgagtcattgggactctaaaactatttatggtttagacttaagtaataatcttttgggtgggtctctactgacagtctcaatatgccagtggcaccctgcctggtagtattgggggtgtttcccaattctaccacatattttattccaagaaaacgtatgtatacaatagtactctgagaagatgtgagaagcatgcatgatttcacaaaagttgtttctttcgtatttatggtttagactaatgtaataatctttcgggtgagtctctactgatagtctcaacatgccagtggcaccctgcctggtagtattgggggggtctccccattctaccacatattttattccaaaaaacgtatgtatacattaatgctccgagaagatgtgagaagcaagcatgatttcacaaaagttgttttctttcgtatgttgggaactacaaaattttgctttcaccaatgatctaattagaggaataattggaactattgtatcaagccttttcataacaatttttattagaaatgaattggcaacatctgacttcataccactgaaagattgggccggatacttaaaaaatagcctaaaaagtgaaatgaatgatgagataattggtttatatggatcgttcctggtcttatcattaagcaacaggaccatttagactcatttgaagaaagctgttgtcatgatcacaaattcagacttcttttccatgtttaggtaggaaatcttttatacatacgccgacgaagttggcttcttctgtggcctatccatttgccttcattaaaccaagtggtgctcatggagatgtaactttgaagcaaataaatcagcgcattcaaacaccgcctccttcgaaatcaaaccaaagcattgatgatgatccatctgcttaccccaagtcagccttctctgggaagcctgtggttggtaaaacaaaaattcgcactgaaggtggaaaaggtagcatcacaattaccagaactaaaggttaagcgtaaattgttgactactatcctttggtctcacccatatttattgtgggattgacttcattttctgtaatatatctggcagatatagaagttgatactgcaattattttttgctcttgttgacatgcatatattacaccaccttagtgtttctttccagtggggtctagataatcttaaagctcttcttttttttgggggggtacattatttttgttttgagccaagtatgtaatgagaatcatagtatttgttttgttagatccttagtccccaccattcgttagcaataaaactcaaacaatttcactaagcttgccacaactttgtaattgaagtatacaggttattttagtttagtggcattgtttattataacttgtgcaagaggttttactctttaacaacctgttttatatcctttttcattctacattttcaagcatggaattaaattttatatacaggatcaatttgacattgggtgtaaaactttatactttgcaccacttaatttatacggaattaactaattcaaccgttgaagtgaaagtttttatgaagtataagtaattatgctttatttcgatagatagtatattaggtcatttatgtgaaatataagtaaatatctaactagctaaaatttaagtaatatttttaaattatgtgaaattttacataatgctaaaaaaatattggattaaacttaagattgattttaaaagtgatttttttaaaaaatattttttaaaagcagtaggatttgtttctataacaaaaaatttgagtgttcacaatacatatatctcttagttgggacagacaacttatgtgtgaagatgatgtctagaaatttggaattgagtgatttgtatattgtaacaatcttgtttctgtcacaaaattaaaaattcatttgaaagtgtttcgaatttcaaatatgctattaggcggttaaagatgaaaatctctagagttcaatgtgtatttaccatgcttttttttaaaaaataaaaagaaagttattaacgtcaagtaggacactatagtgccaatagtattttctaaaaacactactaacaatgcagtgtcccatgtgacattaaaaaaatgattttttggtttttgaaaaaacattttcttagcactgaaaacactagttagagtttttcagtgttgactgccccgttggtaaaatgtttcaaaagtatcatactttgataatttgtctgtaaatttagaaacaaaggagttttctttgagtaagtgtaatatatatatatatatgagagagagaaagtgcgaatattaaatttagattatataatcaaacgtgaaaggtgaagatttaaattcatgtgatcacttaaaaaattgtgactttttgacattaaatcttaatcatccatgtatagttatatgatccagatttaattatctaagcctcataagatatgtcctttatacgaggacatattatgtgagaaaaaaatatcttataaaagtgagatgattaaatatggattgtataatcaaatatgaatgatcaaatttaatatcatataccttttgacattaaatcttaactctccatgtatagatatacaatccagattttattctttctcttataagatgtttctccaaaaaaattattttatatgatttccaagtcaaaatgattttataggatttcaaattagaaataaatattgtagactctttcataagttgttgtgttaaatgattaaaaaagagctctgactctcctaatggttctcctataatagtgttaagcataattgtctctcattaatgatatttttggtctctatcataaagaataatttaatttatgatattattgagtaagtgttttaaaagtattgtaatataaatatatttaataaatttattttaataattatgtatttatgtggaagtgattaccaagtaaaaatgagttttcttcaaaaagaatttgagttttcaaattaaattaaatattgtttagtcttaggtatgcaccaatgttaactaccagagaaagaataaagtatggtcttaagtaggattgtctctcgtgatgatatttgaggtctctatcataattacaattatttttaacatgatatgattgagtctttaacatgaatttgtgtgaaatgcttgaataaacagtttatttagtaactaattttaaactattttgtaataaagtacattttattgttactacatattatgtaaaagttaaaactgatatagtttatgatattattcggtaagtaatttcaatttattttgtaataaaatatatttaataaattaattttaataatatattttatgtaaaactgatttttaattaaaaatgatattatgtgattttaaagtaaaaataaatattattgagcttttgatgtgcaattgtgttaatttgcgaaaaaaaattatcttgagtataattttatgtcatggatgatatttgtggtctctgtcatagctaaaattattataatctatgatattgtcaagtatttagtatgtagttgcgtaaaatactcaaagaaagagttttgtcacatataatataatttcgggtaggattttctctcataaaagatatttgtgatttctattgtataaaatttaatctaatcaaatttgtggtattattaataaaacaatttaattttttaataaattaattttaaacatagagtcaaaaaagtattttgtaataaatatgttaactagttagatctaaatttatttttagtttaacaatttcaaacttacaatataaatattaatcaacaaaaaatttattcatgagattacttaaattgattttataatatttctaagtaaaactaatcttataggattttaaataaaaataaattgtagagttattttatgaaataaattaaatttctcatatataacaatttttttatattaagacaaacatgattagctatttatatgctctaaaaatgaaaaaaatataatacttatgcaataaataaaactattttatttacaataatattgaaataattaaatttgttttccaataaatatatatttaataaaatatattttaatatatttattatgttatctttgtaaaataattcaatactattatatgaatattaacagatacaattatttgatattaaattattaaagatagagtaaaaacaatatgtaattaatttattaactaacaatacatgcattttttaagaaaaatattatataataggcatgagaccgatagttagatactcattttcttctcttcttaaagaatgaatcatgtaatattcgtactagtactagtcaaagtggatatttttgtaaaagtgaagacgagtttggagttattttgtatttatgtaaaaaaacatattaaagatatagtaaaaatattattttgtagtaaatataatagctaacaatacatgtatttaaataaaatgttatacaataaatacataataggtagttaaattctcatcctcataaacgtttgtcttcaatgtgttctccaatggtcagaaaactgcaaaattgtcaaagaaggggtttccctcacttgacatgtctggctttacctacaagatgaaaagtgtgtccaccttggacaattcagcaaaagcaacccaaacaacacttgtccagcctggagggcttgacaagcttgacaagtctgcaactctcgcacctgttgaggttaccaccctcgacaccaggcaacacttgtccatgctgaaaatacaatgaacgctaatcaaataaatcaagaggggggtgaattggtttatatcataaacttaaaattttcttaaaacaatttgcagaatttgtaagaaggatcatatcacttaaagtcttttaaaaaacaaaatctttctaccaaccaatatcactcttgagattcaagtaatgccagaaaataaaccttgttgataatatcttgatcacccaaatttaaacaatgagatatgaacataattagaataaagaacccaacaattatactggttcacctctcaaccttggaggctacatctagttacttccaaccaactcttggttagagattccactaaacaaatattgttctttacaagcttttacaacagatcttccttatcaactctagacaaagatacaaaatctaaaccctatagatttctaagatctagaatctgagaacactactcagttctactctctagagaacccttctttagaatcaactttaaagaaactatttgttttgagaaatcaactcaatcttaaacaaacaatagaactaagacagtctaagattcaagaaagatatcacctcatgatcctttgcaaatgaatgagatgaacacatgcaatcaagcagagattgaatgcataacagtagacaatgctttcttgaaaacctttgtttgtaaatcttgcttagatcttcatcactaatcaatagggactttttttttttgtttggatgaacatgtttttcactcaaaatgagttctttcatagaatctaaagctttgtgagtaagtgggtatttcgtagaaatgaattctggtgtatatagaatcaacagacccataagctattgatgagtcactatttatcactattcactcatctttctgtactcattttaatccctaatttgtgcttaattgtttatattttgtattgtttctcatttaggattcaattggaccgataattcagattttaattaatttggattattttaagtttaattattctaatttgattttcagggcagattaataattaaatgggcttggaattaattcatggacttgaagattgggatgtcgcgtcagcattattttccgcatcagcttggaatttttgttttattttattttattttcgttttgggccaaaattgttaggaaaagcccattttcgttttaggtcagtcactctatatatttgggaactgtgcccatgcagagaggcagccaatacagaattcacgttcagttttccttagggttttagcatttttgttttctgcctatttctcctttagggtttttcattctgtttgaattttcggttcagaatacgtttgcgttcagtttcagtattgatttcattttctgttttcaatttctttccctgtttattttcgttctctgcttatcttaatttcgtttctgctatttcgtttcttttcaatttcattctgcttttaatttcgtttaatgtttcgtttcaattcaatttacgttctgttgttaatttcgaattaatggaaggctaaacctagggttggatcctaggacagattgcagacctctaatggaggttccttgtatttgcaatttgttttctgctcggttcttccttgtttggattcctgttctgtgtttttcgagtttgaataatgtttaatgattctgaattgaatgattcagaaatctcagtttgcttaattctgagagcttgccctaaagaggttcacgtttgcttaattcatgtaatgacgttttaggttaatcttcgcttagttgattaatctggactgatgagaattaagcaggacaaattatctttcgtgaaccaaggatattagaggcgcaatctgttctaagggtctgacttgtttttaatcactgcaatttaattgttaattctgttttaatttagttttcgcattctgccaaaaaaattcccccccaaaacacgttttcaatccctaacgcagataattgagatccttgagagacgacctaggagtcacttcctagtactacatttaaaaatcatattaatttgattgagtacgacctcgatcagctatttatagaaaaaccgatttaatagactgtaatcgattaaatcgttagtgtaatcgattaattcatcaaatgtaatcgatcaatacaccatttaatcgattaaactgttctcaagctttctggaaaagtatttatgaacataataatcgattatatcgtcatgtaatcgattaaagttgcaagacatgaatgttcaaaagacttatgtaatcgattacgagttatggtaatcaattaaagcagcacaacatgttttccagaaaaagcctatgtaatcgattaaaataaatggtaatcgattaaagcaacaatgcatagtttttatttaacactatgttatcaattacaacaaatggtaatctattaatatgttcttcatggctttttcacatttaaaacaaacacacgtaatcatttacataagcaggtaatcgattaaaacagtgagtttttcatatttcaaaaacttcaaccatgagaacttgagtttttgaaaaactatctaaccattttagttttataatcaaagatatgtatgtatgagaatgataatgcaaatgcatgaaggatcataaggaaataacttgagccacttagacaattacaaatgccatcaatgattgggcatgtaaaaagctaaaactccaagctatccttgcttcatttcttcttgcagcatccttaaaatccaacaatctccccttttttggctttgagaatgccaaatcttaattgttcaattgtctatcttttgattgcatttgagggatgaaggatagaaaaataaactcgatatcctgaaatcaaagtcagctttttgcaagaacaagcataagcataatacatttctcataagtactccccatcacttgggtagtcagagttatttcagctaatcataatacatttctataatttcttccctatttggcttatcaaagaccaaacaaatacttagagagaatagtaagaggtgagaaccaaaatattcgttaaaagaaaaatgcattacaatgattgataaaacaaaaatgaaaacatgtgaaacataacaatttgacagaaaacatggcaaatttaaaagatttcaaaatcttcaagtacaagcctagcctctatgttttctaatctagatttcatctcctccatagatgaatttgtttcagccctgtgttcatgatgtagagatagcagtgcatccatcttttgaatcatgagagattcaaaagggctgtaggatgatggagcagtgtctttaggttcttgtgttgattcatcatgatctccagcaggaggaacttgtgttgattcaagtgacgccaagcatcaatgaacaagaatcaaaggctaaaaagttttgtgctttcaacatgctcaaaggcaaagttccatggaaagcattgaagaccactttgattaattgtaaaaggaagtatatgatctgataatccaattgtgcacatcatgcattaatcattcatttaggatcattagattaaaaggtttaatcaaaggcagtatataattaaggcatttaaaaggttaagtttttggaaaaacaaagttttactgaagtaatcgattacacatatactggaatcgattattttgttcttcgtgcctttagaaaacaaatcatgatcattgtaatcgattacatatctgtttaatcgattactaaggctttttatgaaaatggaactctctgtcttaatcgattacatagagttggtaatcgattacaagcctatgcatatagacttagaaaaaaaatagctcactgtcttaatcgattactaagctcatttagaatgcatgactgactagtttaatcgattacttcacgaaataatcgattgtattgttcatagcccaaacccagaaattattaggagcattttaaccgattacagtcttgatttaatcgattacaaatagtaaataatcgattacaggagcgtgtttaatcgattattttcagttaaaaatctgttataaatagaactcacttctctgaagtttaagacttttgatttttcgcattctgggctttaacaaacattctgagctttcattagtgagtttctctgagttctaaacatacttagcttcacaaaatctcatatgggtttttgattcaagaaggtgaagcttcattcattcaaagcataaggaaaaggttgcatatgtgttgataatctgtcatcaaacctgtgattcgttcatgtgcattcattcttggattatcaggtgatatttttccttattctttgatggtgtaatctgttctttgaattttgtaaaggttagtctattgtaaatgggtttcttgcaagtgtagagatagtgtttctctaagaacagttgagtagtgttctcagtgtgggttttggtctctaaggatctaatagggttttggatctctgaacttcatctagggttgatgaagagaggcttgtaaatttgcttgtaaggatatttttacaatagtggaactctactctagtgttgagtagaagaactggatgtagcctcatagtgtttgaggtgaaccagtataaaatctgtggctaatctttctcttaatctcatcatctcttaattgctttgtttgtgaatcaatttcattgcacagaaaattatactctgttttttattcttcttggaaaaggaatttgattgaatattgattcttagtgttgaaacatcttttgaatgtgataaagattctgtggtaatactctgattctaaaatttaattggacaaggttcaaccaattcacccccctcttggttgtgttgaagtattcttatcattttcaacttgttgaccagccatttgccatccacagggggtcttgatcattccaagcttgttaaggtgtttctctttgatgaggctgttacttgagtttgtgttgtcaacaacctcattggatacatatattttaaaatagtcaatgaatctggataccaaaacagcataaggaaatggataattcactagtcttttgtatttaagcatggtctcttctaggatgagaatccagttcatctgaatagagtttttgattccatacacaagttgtatgtcatcatctgtggcttgggcatggttagtggacctaggagttaagatgtaggtgatgatgtagtgaagaagtctatctttatgggtcatagggccagtgctaagccttagcttcagtctcatgtgaaggtcaagaggcatatgtaaaatatgggaacacttcacacttaaccaagaggggggtgaattggttaggcttggtaatttaaaaattttcttgatcaaaatcagagttttgcccttttggatcttttgaaatcaagaacctttattcaatctaatgtttaacccaagatatgtaatagcttaataacttggttgataacaagaaagataaaatatagcaaataagaagaatatgaacaacacacaaagatttatactggttcacttcaaacactatgaagctgcatccagttttcttccactcaacactagaatggagttccactattgaaaattttagttcttacaagttattacaaagcctctctttatcaactctagataaagttcagaaatctaaaacactattagattcttagagacaacccattgagaacactctataataaccaaagttttgtaaaaacaaaaaaaaattaaattaataaaataataatattttactgtagttggcgctgatagcgtgggatctagcgctgatagcgtggcactgtagcagaaggctattttttcacgatttttggcgccatcagcgccagagtggcgccagtagcgccacagatgctggaaattggcgccaggagcgccaaagtggcgccaagggcgccagatgcactggattttggcgccatcagcgccagggtggcgccaggagtgcggcaatgttggtgaggcttagtatataaaggccatatgtgatttctggagagaaacactgtttctcttcttcctcaaggctagccaaaatcacttccattagtcattaaacttgtgaggaacacctagaaagctaaaatccttcatccaaaccccttgaaaccttgagctgagagattcctttctcagaggaattgtggaacttgagctaggcaaggaactacggagattcaagaacattggggctaggagaagtagttcagaagtcttccttgccaattctgaggtaggggtagaggagttagattttatagagaaaagcccactagagttaagcttgagaagctgtgtgggctagagttgagagctttgaggctccagtggcacttaccatccagaataaggtagctttctgtctcctgtcatatctagttatctgcctgactttctttgattatctggatcaataagggctagtcgttatgaacctgaattatattcatgttttataccatacataatgtatcaagaaatgtgattcatgtatgcttccgcaacatttatgtgtttagtatagaattttgtgctattccgatatgataatgatgttaacacactgggtgcacacggggtgttacattttatggtatcagagccaaaattcttgatgaaagcattatgtatggtaattttgagttgtttattactattgtttgaatctgtttggtcattgcatgtgtagacactagtggtgagcctgatcaactcactggtttggtgtacatgtgcaatgtcatgacaagattctagagcaacagtaagtcagtaagggcccagattgatccagtagtggctgtgtggacagccatgcagcatgagtaggctgcaaacaggcagatacaggagacagtgcagcacgagatggctgcaaacagtgagaggaagtaagccttgatgaaggctagtcatgagttacttgaggaggtgcaaatcatgagaaatatgacagaccgttccctacatctccgactcatgagggcaagggtagttgccatcaggttggggatgaccacctaatagggaaccaggtgttccgggttgaggctgaccctgagatgcagccgagagaaatgccaggagtagtgggttactactctcagtggctgagaggtgatagccttgtgaaataggagaccagcttctagataaatgcttccctgaaatgctaagagaagagcaggccaagtgagggctttattcggggactgatgactagagttggtcaagtctagatgagatgggtcaccaatgtatgtttcagatgtattctgttggatgtagaagaggtgatgacccaaagttcagaggcgacctcctgaggtcagtcttatcttaaaaaggtgatacttatgggagaagacccattgaggagagtgccaatgggccagtgttatgataggcatgtgaccagaatgatctctatgataatgagtccaaacagtggacgaatgagttatagctactacggtgattatggtagcacaaactgtaggctggatttatgcagtggaggccagaaaggtgatcagggctcattacttgatcagggatacaaacctgatcgatgttatgagagaaagtctggtgtgactctggagctactcactagtttgaattttattacactgcggttaagctggctggggataaggctgctttcctcttgtggagggtattactgctcataagagggcattatggaatgattatgtactgcagggatgtgcagtcttggttgatggcaggacatctgcacttgaattgtgctgcctagttacacctaccctgagaaccatgcgggatattgattggttgagtaaacatgggacgaaactggattgtcacaaccagaggatggttgagagttctggttgtgttgctttgtattgttatgtcaaagtttgtttgattttagagctatctatgtggtatgtgataagctgataggcttaagattaaataagtctagttctgccctccgctagaggttatcatcacacctagaaagttatgtggatgggcacatgttataaaaacgtgcagtgttagcataaggacagagagtgtgggattgagttgtatggtctagctatacctacccttgaggttatctcaggtatgagttgattgaccaagtatggcgaaaagctagacggtcgtcagaaggaggtgtggtgctttctgacgtggttagtgtgagctccacctttttcctaccgaacttacaagctcgtaaggtcgttatggaaggagctcaaggtatatcttcttctgtgaaacagaggataagttaagtgttaattcagcggagaacttggtggtgagcaaaggtggataagtttcaaaaagaaatattcagctaccatcaggaaggaagataaatttctccactgatctaatttctgatgagggaccgatatctatgacacctgattataaggctcctctggaatagagagggagctgaaggtgcaattagaggactggcggtctatcagactgagtattcgatgtcgaggaacatcagtgtcttgagaaaaatgaaggacgacggatctagatggagggtggattgcaggcagctgtgtagggttcttattgaaaataagtaccctctaccttgtaatgatgatcggttggattaaatttaagaggagttgaagacttctctaaggtcgatttgagatccgaatattatcagattcagataaagcctgcagacataccttagacagccttctgatctaggtatggtcactctgaatggcagatcaccccctgtggtctgatatacgcctcagcaatgagcataagatatgtgagcagggtattcagacctttattggatcagggtgtgagtgatgtttttggatgtcaaattgatttactccaggacagagacagagcgtgccaagcatctcaggactgtttttcagaccccaggagactagtaccggtgagccaagttggccaaacgaaaattgtggctgacagaggtggaatcccttggccatttgatttcagtagtagctggtgtatcagttgattcccaacaagttagaggcagtatgtcctgggaaagacccaaggacgtatcggggatctgtagtttcctgggatgggcaggctatacaaaagttgaagtagcggttgaccctagccctgggatgacccctcctgaccttgaatgaacatctgggagatgttatgatgcgtccatgcaagacttggatgcatactaatgtaggataagaaggtgacggcttgtgtttttaggcaactaacattgtcttgaagagtcttatcctacatatgcttgagagttggtagttggaatgtctattctaaagacatagcagcactagtggtggggtgccaagttgatgatgttcattgaccacaaaagcctcagacacctctttactagagagagttgaatatgagactgaggcgatggatagagttcaccaggaatatgattttggctgagatgccatccaagtaaagtggggggtggtcgctgatgcttatagtaggaagcctgcggattttctctgtttggaaatctatggctgcaaatcgataagtgatatagagatacgcatctaccagtgatagaaggtgcgtatggtcttgagttgagcaggaccaaggtggttaatggtaagatcaagggaatctgagaaatcagaaacagaataaaattatgaggaccagggtggtcaatactatgtctactgagaagattacgacttgtgatgaaccaaggtcgtactaggatgtttaatgacgacttgagagtgtcgtccagtctaaggtacttgagggccagtttagcactcatccaggagccaactagatttatgattagctgaaaaggagtttctggtggccagagatgaagaaagacgtagccgtgtttgtggctgagtgtctggtgtatcagaaggtaagattgagcatcagagaccgtctaatatgcttcaacctttgtagcccctgaatggaaatggaacagcatttccatgggttttgtggtgagattaccggggggactcagagtggatgtgattccatttgggtgatggaagataggctaaccaagtttgctcatttcttgcctgtgagatctgattccaccgcagagaagttggcccagtaagatatcaaagagatataaggctgcatggtgtccctgagagctttgacagtgggagaaatccggagttcacctatgggttttggggggtgttcttcaggatacaaatgggacccaactagagttaacacaacttattatcctcagatagatggtcggacagaaaggaccattcaaattctgaaggatatgctgagaatttgtcttggagcaaggtactagaggaaaaaagatgtctacctctacttctaatagagttctcatataataacaaggtttatgccagcttgggcatggcaccataggaggccttgtatggccggcggtgtagaactcttgtttgattggacagaggtgcgagaaagagacagctccttggacctaagatgggtcaagagatctctgaacagatcaagatgatgagaaacaagttgatgaaagctcagagtcatcgaaagagctattatgatcacaaatcttgtagcttgatgagggtgatcatgtattttagggctgtctccagtcacaggtgtaggacgggttttgggcacgaggaagatgagtcctaggttcattggtccatatcaaaccttcagaaggaaggaccagtgacttagagcctaatataatccagattagaaaatctgataagtcctacacggctattgaggattctggatcggatgagaagaagaacaagaatttcaccccagtgtttaacagatttggtttggaattttgcggacaaaattcctaaaaaggaggggtgaaatataataaccaaagttttgtaaaaaaaaaataataataaaattaataaaataataatattttactgtagctgtactgtagctggcgctgatagcgtggcactgtagcagaaggctattttttcacgattttaggcgccatcaacgccagagtggcgccagtagcgccacagatgctagaaattggcgccaggagcgccaaagtggcgccatatacactggattttggctctaggagcgccacagatgctggaaattggcgccaggagcgccaaagtggcgccaagggcgccagatgcactggattttggcgccatcaacgccagggtggcgccaggagcgcgacaatgtcggtgaggcttagtatataaaggccatacgcgatttctggagagaaacactgtttctcttcttcctcagggctcccacctccatttttgagtgcccaagcttcctagaaccttgtttgctagccaaaatcacttccattagccattaaacttgtgaggaacacctagaaagctaaaatccttcatccaaaccccttgaaaccttgagctgagagattcctttctcagaggaattgtggaacttgagctaggcaaggaactacggagattcaagaacattggggctaggagaagtagttcagaagtcttccttgccaattctgaggtaggggtagcggagttagattttatagagaaaagcccactagagttaagcttgagaagctgtgtgagctagagttgagagctttgaggctccagtggcacttaccatccagaataaggtagctttctgtctcctgtcatatctagttatctgcctgactttctttgattatctggatcaataagggctagtcgttatgaacctgaattatattcatgttttataccatacataatgtatcaagaaatgtgattcatgtatgcttccgcaacatttatgtgtttagtatagaattttgtgctattccgatatgataatgatgttaacacactgggtgcacacggggtgttacaactactcaacaaaacccctatggaaaccctatctctagattactagcaagaaacccatttacaatagacaaaccaaaaaaccaaaattcaaaacagaattacaacttcaaagataaggaaaaaagtcacttgatgatccaatgaacaatatgcatatgaatgatttcaccaggtagaagaatgatggcaatcttagaacatcactcttccttaagctttgaaaaagaaaatcttgcttcactaatccctcaaagacccataagtgttttgtgaaagtaagaactcaatgaacccagaaaaatcactacaagaatgtttagaaagccttagaatgctcaatgtatgaattgatcaagttagaaaaacagcagagcatgagttctatttataataagctttctaactgtcagtaatctattacatacgctcctataatcgattaattcgcatatgtaatcgattatttcaagactgtaatcgattaaactgttcaatagatgttctggatttgagcaacgaacagaataattgattatcccatctggtaatcgattaagacagcaagctcctatttttgaaatacactatgtaatcaattacggattttggtaatcgattaagtcaggaggcttcataaaacaatttgtactatgtaatcgattaatgcagcaaaacatgttaatcataagcatataatgtaatcgattactatttgtggtaatcgattaagacagagagatgatatttcctatttagcctatgtaatcgattactaattgttggtaatcgattaaagtattcattatatcagtttatatgaaattataggtaaaataatcgattaatctgatacataatcgattacattgcacttgaaaagttttccagaaggcacaaagaacaaaataatcgattcttatcttagtataatcgattaaatcagtaagaacttatttttccaaaaacttagatttaaacttgcctaatttaccaaatgctcgtatatattaaaactcaatttgattaactaaatgaatgatatgaatgttatgcacatggatcatcagaaaatacttcttccttttacatcaatcacaaattgatttccaagacttcaaagcatgttgaaagcacaaaaccaagcttgatccattgttcattcttcaactgattcttcttttaaatcaacagcatacctctgtaagtatccaccctattgtaacccccagcttcttcctcaaattttcttaccccatcaaaggaaatgccagccacttcttgccaaacttcaggggttatttccattgctaccccattgacttgagacaagattgtcccatccattgaagccttggcaagtttaaaaggccaatttaaacaattcaccttctcttggtcattgtgtttgttcatattgttttctgtaatctctcatatttttttttctttttttcctcatctttatattcttttgaagacttgaactgagctatcaaagtgaataattgatattgaatttttgtagtagataattggctcttttttcttaagttgtttattttattaaaaaaaagtgtttagaaaaggcaaaaaaaatttattaattaaaaattctttcttaaaaaaacttaaaaactcaatattaattttttttagtaagccgatagaattttcttcttaaaataagtagaaaattatttgtttaaggagaagtagtttagacaaacatattaaaaaataaaaaaattacttatttttattaaaataaatatttttaacaaataaatttaagcaaatcggcccgttagcatgcaaattttaatttttaggttatatcatttcatcattttttatttactttacaaaattattttattaatgatctttaattatcattgtattttattttattcttgtactctaggaattacaaaaatgtcaaatagaaaaaacaattttgattttgaaaaattaaataaaaagataaattgataaattaattgaatctcaacgtgatgatatttataatttgttagtacttttaacagatatcacactagaagggggggggggggggtcaaatagtgtgttagataaatatctaacgattttaatgaaaacaacatacctttgtccaatgctagataaaataaattttcacaaaggttttcaaaagaacacttgtgtgactaggtgtgtcaaaataagcttaagagagggcgacaccaggttgtccgcctttctttttcatgtaccaatgtctctttgaagttctgggtttaattcttcccttgaactcttttcaatgtgctctacttgagtgcttaaatgtaaacccctctcaacttcacccaatagttgggccatggttttgaggtcctgagcccctttttcaacattcggcttagtgtgtcgttgtttttgtattttttcaaaatgaaattgacagggaaaataggctgggtatcctcaaacagcgtgtccaagaagctgctcgagtttgactcgaacgtgcttcgccgcttcaaggaccgtttcttttaggtcctggctactgatgtcgtggctgatgggttgccactgatgttcaatcggaatgaggaaccccgtttcccattctaatagcagtcaaaccctaccaggttgaagtcttttgacgaggatttgttgactcttgtggaaagggttgacaaggctattttggagcaacttccagccttgttggatgcgcaaaccatcttgtctcttccctcgacggatgatcctctcgttgccttagatggtaaagtatttttccttatcttcttttgtctgatgtggtttttacttgagttgacccttacttcatttttgcttgctttgcaggtaaaatgggtgatttcgcatggaggcccttggtgaagtaggtcacacttgctggtgtgactgtgccaccttctgttgtcgatcctcttgttggagaagggggtcaacctactactagggttgaccctgatgatgaagttgttgaggtctcccttaacgcgccttcctctattttggctaagaggaagcatgaggatggcgctagggtgtcaggctgcaagaaatcaagggttcctttcggccttcatgctatggggcaggcttttaggctgacatccggtttgggtctccctcatgttgctagttcgcaaagtctgcttgcagctccgtcgaccgtccagcctactgttgctgctcctactccttcgactcctccttccttgcctgttcaagagttttttgcttctcctcctattgttgtcactgcatcaatctctttggttggtctcgtcgtggctcttgcctccatcactattatgcctttactcagtgttggtgtgatgatcacgagtgcttcagaaatgctacctccttcctcttcagctccaccagttcccccttcggctgtgttggcatcggtgtcgccttcttcctaatccaattagttggggttcagaatacaactaattctacaaaggtcttcctctagagaagtttggctattttggaggaaaacggacaaaggcaccaagaggcgctaagcaaggtggcatccttagagactaaggtcactaaattgagggccactgctcgagctatttggagagtggggttccctaaggtggcaaatgccaatgtcgcctttgctgaggcggttaggtgtaaccacaagttgtcgtccaaggttggcggtgctcttgccaagctgttgtgcaataggctggatggtgacaaactagctagacgctgcaaggactttctaaaggagaagaatgaattagttggcaaggtagagagcattgctgctgagaaggatgagcttgctaatgtgttctaacctcaaggcctagctgaaggagtcggagtccaggatggaggaatctgagctcagggtgtaacgatccgccttgtcgctacgatatcactcactctaatcgtgtgaatttcaaattttaatgaaaacttcattaatttgattagcaaaatggtagtaaatttttcgtgataatacaattatcatacaacggaacaaatacataaatgaatacatattgatgtacatttaaaacattacatatcattcacatgtcagaacataatatagttttatttacaaatatttacgtttggaattatgtaacacctcgtaggcctccgacgtattatcattaataatatcatattagcgcttgaaacatcaatataaaaactcagcggaagcatagaattatttttcttgatacattatgtatggaatcacaaatatcataaacaacacacccataagaaccaatatcatacccctgctgatccagttttctcataacatatatcaataagtcagataacttaaacatacaggcagatagtcaaatatacaacaattatactcaggggaaagtcttatgtcataaactcagacaggtctgtatatatatacatcagtgttcacaccaccctgtggtgatacaaaagaataacagccctcctcgagggtatatagaactatacatcaaaacagaatcaaaatagagccttcaagctctccatgccgctcctcagtcaagcagcctagtctctgctgggcctcttaccctgagactgatcctctcttctagaatggtcatctgaaatcatagaagccccacacggggtgagataacatatctcagtaagctcagggtccttgggaaatcattcccaccctggcccactaactcataatacacacatatcaagcaaacatctcaaacatggcccactggcctggccctctggccctcaacaccacatggagcagccatctgctcgatactagtggcagagatccctcaatgcctggcagagaaccctcaacgccgtgcggagaaccctcaacgcataatcacatggcagagaaccctcaatgcctggcggagaaccctcaacgactaaatacaggacagagaaccctcaatgcctgtatttatctattggccaacagatctatctcactcatagcatacatatatccaaaatagatgcataccagatcaatacaagcaataccacagccaatgcatgcatcatgaatcatgaccaacactcccccggagtgtggtgtgcaaccatgtgggaattcaaccccaaaaacactgaacttacctggtaaggtctcactttgcagttccttcccaggtctgtggctcccgtcaccaacagtctcagaatcaaagcctaatcaaggcacatacacatttcatatcaaaataagccctcaggcatccaattcacagtacataacataacagaattcccctatcctagggttcagtcaaactcaaccccacacaaggctgttcatagaccattcaaggtccctcaaggctgaatgccaagcctctgagtcatctggactcaattctcaatcacacaaggcacagtttcctcagttctaacctcaattatcactagaacggactgagttccactcaaagtctcgttcaactagccacttaggctcagcacaatacaatcaaggctctagcctatcaaagaaccatcaacaactgactctagacaagtcacacaggcatatacagagccaagattcaaagtcatcagaatcaaaaactgaaagctatttcttcatctattcgttgccctgaataagtttctctacaggaccctgggctaattctagcctcatctcactgtggatcacattactcaggaaaccccaaatccacagagaatcaagagaattcaggtttcttacctcagtagcgaccaaggagacttcagaacagcttcctctagctctaatgtccgtctcccgccttaggtctcgcctattctcaagttctctggggcttctcacttgagaattcaaactctcactcaactgggttttcaagaacacaaatgcaggatttcagctttctaatcggttctaacaaggttataggtctcaaaaggtgtttaggacacaaagcaaggtcctagaaagcttggaacaagctctaatggaggctgggtcgtggagaagaaaagggaatagtgttttccttccaaaaacgcgattgccctttaaatactcagcctgcccgaactcccgcgcgatccgcgccacctcccgcgcgatccgcgccacaaagtcggtgaaccggcgctatcagcgccatccccgcgctaactgcgtgaacctttcaagacctttggcgctacccacgccacctctggcgttgtccgcgtggaattccagagaaaattggttttccaggccacttcccgcgctaaccgcgcggtctctggcgtgacccgcaccggctggaaaacctctggcgccaccttgacgcccctagcgtcagctttcagagaacctggggctcccagcgccatcctgacgcttccagcgtcacaaaccagtgggtctggcgcgatcagcgccaaccctggcgccatccgcgtcgcacccttaacaggattttctgatgtcgcgcggggttaggtgccaagaatgagggtccttacaaattacatgaccaacaagaggaatcaaggaactaactaagaaagagttgattaacaaaacacaactcttttccaaaaagaattccaacgttatcatgtcggttcggcggctccaaccaaaaagaagatctccctccaaggtcacatattgctgctcatttgctcccacgaatgaaggttcgtaatcatcataggtaccaaccacacagtacaacaaatgcaagggtgagtttattatacatatacaacatgcatcagacgacaatgattagaaataaatcaataatgacaaccacaatcatcctcgataatccatgaattcaatacacactcaacaaaccagtaatcaactatatttcacaaatcaaaacaatcattctcagaatgatacatgaacctgactcatctctcagaatacaatgtggtaccatcctcatggaaatatcctctttaggaaaatgatgcagtagcttgtcgaggtcaccctgttgtgcactggttgctccccctggtgatcaaccctgagtcacaatggagttccaaatagagtgattgccccctaataccaccggtacttactgtccatcattttatttccatcaaggcaacatgaagtatgaaacatgggcaccaccaatgcatgacccaactaggaacacatctttcctcgcaagggtaacctgtcatgcaccctccttatacatacatagcacaccaatgtgggctcaccgatgcactgaccgtggctaggaacacatccttccttgcaagggttacccgtcatgcaccccccatgggtatccatgtatatccacatcacacaatgacattgttcacatcaacattatctctcatcaatgtcattatcaacatccacatcacatcatctcaatatcatcatacatatcaaaatcatctcatttcaacatcataaactatatcaacattatctcatttaaacatcgtcaaccacatcaacattttctcatttcaacattatcaattacatcaacattatctcaatctcaatatcattagcgacatcacaaacaatcacatttcacatctatatgtaatacatatgcctgagattcacattccccatgtcttcaaacacctcaaatttcatacattcacaattcatcataccataagactgttatttttaggaaaattctaaattaaagaggaggactacaatatataaaaacactcttatgcccatttaaaaatgtactcaagaattaaataggaaaacatattataaaattttgggcagagtctcctctgtaattaagactttacccaaaaatctaatcattacaacaacaacatcaacatagtttcatccatcaacaagccaattcatcgcatcccaatagttaaaaacacaatttttttcttgaaaacgagcacacacaagaacaaacacacatcaatcataaattcatcgcatcccattggttaaaaacttagttttttcttgaaaaccaacacacaacaggaacaggaagatatcctcatagttggactgcctggcccccaactatggtaccagaactatgctaaataataaactccccttacctaactagaagttctccccgttacaacctagcagtgttgtttagcgatccttcgaatacacgtgcttgtccgaatgcagagctatatataccaaatcaaagacaatttagtatagatttcaaagacaagatcaatgttaacagttggggtcaaatacgtactcaaatcaaaaaggggctaaacagtgttttgcgagttcacatcaaaagacatcatttttaaattccaatcacatcaatgtgatcgacttccaacaaggatcatagaaatgacatcaatttgataaaaaggaaacttttacaacatctcatttttaaagggttttcaaaggaagtgtaaaactcccaacaacaatacccaaaatgcaagagacactaagagaagcttaaactagttaggagaagacaaaagaaactaagattacctcaaggaaaccaagaaagaaggatcggaggctctgttctctatcgaaactttaagatgagtttcgaagatttcgctccaattaaagggttcctctctgtgcagtggtccaacggcaaggggcggtggctcatggtggtcaccggtcgtcttgggtggtggagggtgatggtgggaggttgggggaaggtttgggaaaggaaaaaagctctattttcgtgattgttgctgctggtacgaatttatcaccgctttgactcgcccaggtgagctaaaatgcctgccaaagttagcctgggctagctgaccaaattttaaaatttttgcttctttgaaaaattaatttctgactcttcagatgttttttcgccaatcccaacagtaaaaagttacatatatgggttaggagcctaatttaaaatgtgaaggtgatccaacggttaaccaaccataatgatgattttattaaaataggtttcgggtcaaactcggaatcactcaattacaacacaactccaacaactccacataacttgacatctacaccaagcaattgagcatggataattcacataacatttcaattaatctaaactaatcaaataatcaaacaatcacaacaaatacaccaaatatttattttcagttatcgaaatttcagggtgttagacagggcatcagaggataaggaggccagtaggaagcttgaagaggagttgctactgtacaagaaagaggccaggagcagcatgaaaatggcttttataaggctgtcatgcaggtcaggttctttgccaaggatcttgacttgggtctttatgatccattcaaggacgtgaaggaccaatgaacttcttgacaaagaggaaatagctgctggggaggaggatgctagcgaggagcaaggcgatgaggccgatgttaggctgccttctctttatatttttatttgttggtttttggttgtgaaggctttgtaatgttgacaatgattcttcttctttaataatgcatttactttcctttgttgacgaaatttgctctatcgtatgtctttgcatgttgttgccttctgtctatacaatgcttagttgcttgtggtagtaaggatagaccgtcttgatgagagtgagattttggcaaagcaatttcagaaatagagagctagatgacataatatcatcttagatttgacttcaacctggttaaaggtcttgtcgcccatcttggtgatgcttccttttgctttatggagcttgtcccctaaggcttgtgaggagttagtttaacttccacctgattgaaggtcttgctaaccagttgaatggcatctcattttgccttgtggaacctcttgttcgaggacaagtaattgaacctttggctatgctcgttgtagttccaaaggaaagagtttaccaactgaaaaaacaaaggaacacttcaaaacaaccaagagggggggtgaattggttgaaccttggccaattaaaattttaaaatcagagttaccacaggatctttatcacattcaaaagttgtttcaacaccaagaatcaatattcaatcaacttccctttccaagaagaatagaaaacagagtatagatttctgagcaatgaaattgattcataaacaaaacaattaagagatgatgagattaagagaaagattagccacagattttatactggttcacctcaaacactatgaggctacatccagttcttctactcaacactagagtagagttccactattgtaaaaatattcttacaagcaaatttacaagtctctcatcatcaaccctagatgaagttcagagatccaaaaccctattagatccttaaagaccaaaacccacactgagaacactactcagctgttcttagagaaacactatctctacacttgcaagaaacccatttacaatagacttatctttacaaaaattcaaagaacaaattacaccatcaaagaataaggaaaaatatcacctgataatccaagaatgaatgcacaatgaatgattctcaggttgaatgacagattacacacacatatgcaagcctttccttatgccttgaatgaatgaagcttcatcttcttgattcaaaaacccatatcaattttgtgaagctatgtatgttaagaactcaaagaaactcactaatgaaagctcagaacgtttgtgaatgctatttgggttcgtaatttcacaacagataaaagattactaacctcagcataagaggctccttttataacagctttttaactgaaaataatcgattaaaaaggctcctgtaatcgattatttatcatttgtaatcgataaatcgcgatagtaatcgattaaaatgtttaagatatgatctgagtttcaagaacgaatcatttaatcgattattacgatacgtaattgattaagacagaggcacatgtttttcaaaataaatcttgtaatcgattaaagcaatatgtaattgattaaaatgatcttgaaccattatgggttttgacaaagaacaatataatcaattattccgtgaagtaatcgattaagacagtcagcatgtatttttctaagaatgcatattcaggcaagtaattgattacaaatttatgtaatcgattaagacagagagttccatcttacatacaaagcctgagtaatcgattaaaccgatatgtaatcgattacaataatcatgatttgttttcttaaggacacgaagaacaaaataatctattccattggctttgtaatcgattattaatattgcaactttatttttccaaaaacattgcttcttaagtgcctttctaatgaattgcttttacttaatcatttaatcttatgatcctaaatgaatgattaatgcatgatgtgcacatttggattatcagatcatatacttcctttttacaattaatcaaattggttcttcaagctttcctttgaacatttcctttgagcatgtttaaaagtccaaaaccttgaagcttaatcttcattccttgatgcttggcttcacttgaatcaacaatctccccctttttggctttaaacatgccaaatcttccatttgattaagccagcgcacttggagattaatttgaaaaagctattgtttgaacaagcattataaacctgaaaactttcaaacaatcttaccaaaaacaagtgttaaagcacatgttgttcatgaagcattcaatcaagcattatactattgtattaggttcagttttacacataaaatccccctaaattccagcattcattcatatcaatttctgagcaaaaaattgaataaaaaatagggatgaacagagtacatatcaaactactcccccttaatcaattctccccctatttggcttgttaaaagtcaaaaataatgtgagcacagcggattttaaactagaattgcatgaatttattaataggatagcatatggggcagttacataatggaatttaagcactgatcataagggaaaacagaacataacataattcattacaaatagaaagcatatcagacaaaatataaatctaatttatcctagaattctgcagaggcttgatcattcatattagcctcaatagcatccaacctttccctaatttcttctaaggctccatgagtttcaaccttgaagtcctcttgaagcttcagcattgtgtccatcttttgaatcatttgtgattcaaaatcagagaaggcttgaggtgcaggctgtggttgttgttgttgtccctcatcctcagaatcagcagccatccccccttgctcagcagcaccaatttgggcagccattacccagccttggggtgtcttcctcatgcccatcttggtaagatgtgattccttaatttgactattgtaggcaagggtattatctattacttcattttcaacatctatgttgaaatgatcaatgagcctagaaacaaaaacaggatagggaaatgggtaattaaccatcctttttgacttcatcatgatttcttcaaagatcaaagcccaattcatgggaatgtggttcttcagcccatacaccaactggagatcttcatcagttgcctgggcatggttggttgctcttggggttatgatgtatgtaattaagtagtgcagcatcctatcttctgcagtcataggacctgtgccaagtctggtcctaagcctcatgtttaggtcatgaagcatgctcctataggtgtccatcttgctgtagccctcacgatcttcgtcaaatctacgggctccctcacaagcaatcccacccatagcttcccaaatatcagaggtgatgtgcatggttaccccttttaccttggaccttatatcaccctgcattgagcccttcaagcaggtataaaacactctaactagatcaggctagaaggtactcttcatctctaaaaacctcctaaggctttgtgactctagataggctgggaattggaatccttgccttctgaaccagtctaactctatgtatttgggagtggccacaggcttagtggcattaaattgaaggtagttcatcttatctgtctcagaagagaaccaaatatcaagcctattggctggaggaggttggggttgaggttgagggggattggatgaggattcaccatgtctcctctttggtttcctaactctcttggaaataggctcagacattatgtatgtagaaagtgtgggttacagactagacacaagaaaaatgcagaaattttgcagaaaatgcagaggagagaaagagaattggtgtagtgattcaagatacacaatacactatttataggcaagagtcaaagcataaacgtccatattttcaaaaattatagctgttgtgacggtttaatgacattgggtgctgttttaaaacagattggacagtttaattaaccataaaaatctgtcagatttcagacaacagcaagaataatcgattatttcgtaatgtaatcgattattccagttcaattaggcttactgtaaacacgtggtaatcgattatttacataagtaatcgattattttaaacttgatcagaagttgaagatgacctgtaatcgattctttgcttaagtaatcgattatattatagcatgaatcaattatccaaatatcagggccattggtaatcgattatcccgagtggtaatcgattattacagagtaagcatcatttcaatataaatggtaatcgattacggctcataagtaatcgattattccagagagacgtgcttgaagttttgaacttttggacaatgtaatcgattataccgatgtgtaatcgattattccagagaaaggtgttttctgaaaaagtgaagaataatcgattatcattggtgtaatgacctaaatttctacttattctttattatttttattcttacttatagataaattttctaagaaacgtataatagtaaaaattctaaagcataagatttgcaaaagatttgctaatcatatacatagccaatgtctctgatacaaaagtttagataatacaagtacactactttctcaaaaattcagcttattacaatacttcgtttatatttcttcactactccaaggcttcacggaacctgtccatcattgccatctaaaaaaaacatgaaacaatctgggtgagaaataaatttctcagtaggcaaagctaaatcccaaccctattattaggttagtaaaataaaaaaaaaatcaagcacatccacaagcaatatgcaaactatatgaatgcatgagatgaactatcccagggcaaatggctcccacatatcgtactgtatgtggccacgctgagcgtggtcgctgctatagtcttacgcaaacatgcatgaattttgccatatatccttgcccatgggtactacatatcgtactgtatgtagcatcagattctgtttccccaaagccttgtactggacttggaaacatggaaacatgaatccacctatcttaatcacatcaatcatacatatgaaacaatcaaatgcataagtaaaacatagatcatatcatcatatatatcataagtatggttacaccaccatatcttatccaataagcttttataagtatggttacaccaccataccttaattaagtaagattattaccaaacttatgcataaccagagaaataaccttaactacagaaaaattatgttagtagtctaactgataatcctcaatataaataatatctaattcctttaaacctttacaagtaaagattcacatctagtatacacactaattaatcttcaaaatcaaataattaattcttaaaatcaaatcatcaagtatttaaaccattcaactccacaccattcatcctctacttcaaaaattaaattacaacatatccataaaaatataaacagacagtccaaaacatcattaaaatcaccttaaaagatcatcaaatagacttccatacttcactaatattgatgggtataaatcataacctaacttatgacttgaatcaacatattcttatcaaagaataaccattaaacatcacaaaattcaagcctaaaatcaaccatgaatcaacctactaaagcatataaattaatccaaaccattgattaactaaagatttaagcttcacctacctcaaatgagtttgagtcttgatatccttctaagcttgttaaatccttcctaaggttgtttgcctctacacgtgatttcttcaaggtgatggggtttacttgatttaagctttgaagggaaagacgaaatgaaatgaaatgaaaatggtgtgagggagagagttcacgtgaggtttggagaaaggagtggttttggaattggtttgcacttaggttcctcctcctccctttatatagtgttgaagaaatgattacttagagaaaaatctcataagccatcattattcttttacaagtgtccctacacttattacaatcttaaggcttccttcttttcttccttccaagtgtcctatcatttggcatgatcttagagcttcttctcctttgcttccaagtgtccaaaatcatgaagtttctccattcctcttgtattttcgtggagtagctcattcttgagtttttcccaaacctgttttagtaaaattttatttctggaatctttaaccgttggaactctttaaaattttaaaggtacactactatctcaaatatgtaacttttgaccgttgggattgttgaaataatgtctacaactgtcctcgtgcaagatggaagagtgtagagaaatcttggcttgatttttatgttaccttgcatctatgccatacaagtgtcatgccacttgtttctatcatgtggcttgctttccaagtggcttatcatgaagtttcttgcctcttctacatgttttctcacgtgaatgaccaatctaaagggaaggaataccaatttttcttccttttatgccacatgtggtcatttttgatgatgaataaaaatctagtttcaaagaaattcaatttaatttgaattcttttatctaaataaaattttgaatattagaattctagatgttcctaagaatttatcccaatgatagtttaaattaatcctaagcagtcttatacagggcaatacataaacctttcattctagactacatcttgatcttgattttgattggtctatacttcttctgaccatcaaatttactaaaccattttattaaataggtctatccatcctataattaagagaaaattctatagatttcatgtatcatttttccatatttttcttatgcttgagttttcttgaataaagcctcaaagttgtcattttctaaaatttgtaagaattttattctagagttttgtgtcataaaatttgttgatacttagtcagttaagtgtattctataatttcatcaagtttctacaaaatttctaaagttatttgagcatttttagcctaggggcattttggtaactataccattcaacctaggggtattttggtcattttcaaaaatgtccaagggtatttttgacattttcatcttaagggttttctagtaatttctacttcatggaaagagtgatatagttagttttctctaaacatacttctatccaatttatcatcacatttttataattttggggatgttacatttcatcccccctaaaaaaaataaattttgccctcaaaatttgtaattacctgtgaacagttcatggcacttctttctcatttctgattctagctcccaggtacactcttccaaatgtccttgtccccaagctacttttaccagtggtacagacttatttcttaattgctttatttctctatccaaaattcttgtcgggggcaagctcatagttaaattatcttttaactgtattgattcagattctaggacatgacttggatcagaaatatatttacggagttgagagacatggaaaacattatgaaggttagaaaggtttggtggtaaggctatttggtaagctactgtacctattcttttcagaatttgaaaaggaccgataaaacgaggactcaactttttgaccttcattgctcgccctatgcctgtaattggagtgactttaagaaaaacatgttctccttcttgaaattctagaggttttcttcttttatcagcataatgtttttgagatgttaccaatttctctctaatcttcttgatttgctccgtggtttgagttacgaggtctggacctaaaagacttatttccccagattcataccagcataaaggagactgacatttcctaccatacagagcttcaaatggggccattcctatgcttgtatgataactattattataagcaaactctgctaatggcaaatatctctcccaagaaccctgttggtctatcgcactagctcttaacacgtcttctagggtttgtatggttctttctgtttgtccatctgtttggggatgataagcagtacttaagcataacttagttccaaatgctttttgtaatgctccccaaaacctagaagtaaaacgggggtctctatcagaaattaaggtggaaggtacaccatgcaatctaactatttcttgtatatacagttgagctaataagaaatcctaataggtataaaatgagctgacttagtaagtctatctacaatgacccatattgagtcgtggccagaaatagttctaggtaatcctactacaaaatccatagctacactttcccatttccactgaggaatttctaaaggttgcaaagtaccagaaggtttctgatgttctatctttaccttttgacatactaagcactttcctacaaattctgctatgtcctttttcataccaggccaccaaaacatttttcgtaaatcttgactcatcttagtaactccaggatgcattgtgaaattactcttgtgggcttcactcaaaattttctctcttaatctatcacttttgggtacacatatcctcttttgataagtccacaatccatcattatttacctcaaaatcttgcaattttccttcttggacttgtgttaaaatttgttgaaaatctaaatctctctactgtcctagcctaatgtattttttgaaatcactagtaatttgtatctgacttaaaatgatacttttagaatttacagaaaatcctaaattaagatttttaaaactttctattaattccatctccttgatcatcatcgtagatacatgcagagatttcctacttaatgcatcagctactacatttgcctttcctggatgatattttaactcaaaatcataatccttaagaaattcaacccatcttctttgcctcatattcaactctttttggtcaaaaaggtacttaagactcttatgatctgaaaagacttcaaatcttactccatacaaataatgtctccagatctttaaggcaaaaactactgctgctaattctagatcatgggttggataattgacttcatggggtcttaactgcctagatgcatatgctaccacatttccattttgcatcaacacacaacctaaacctttctttgaagcatcacaatatacttcaaatgcaccatgaggatctggcaatactaatactggggtactggtcaatcttctctttaattctagaaaacttttctcacactcgggtgactatacaaaaggcacatttttcctagtcaagctagtcaaaggtaaagctatttgggaaaaccctttaataaacctcctatagtaaccagctaatcctaaaaaacttctaacctcagttaccgtggttggtctctcccaattcataactgattcaatcttactaggatcaactgaaattccttccttagaaacaacatgtcctaaaaatttcacttccttggcccaaaattcacacttagataatttagcatacaatttcttttctctaagtgtctgtaatactactttaagatgttgttcatgttcttcttttgattttgaataaacaagtatatcatctataaaaactactacaaacttatctagataagatctaaatattctattcatgtaatccataaataccgctggagcattagttaatccaaaagacatcactaaatactcataatgcccatatctagtcctaaatgcagttttaggaatatcttcattcttaaccctaatctgatggtatcctaacctaagatcaatcttataaaatattgttgctcctcttaattggtccataagatcatctatcctaggcaatggatatttattcttgatggttatcttattaagctgtctataatctacacaaagcctcattcccccatctttcttcttcactaacaaaactggagctccccagggtgaaacactaggtctaataaatttcttctccagcaactcctctaattgctttttcaattcttctagttctcgaggggacatcctataaggtgccatggatattggtccagatccaggaattaaatcaatagagaattctatttccctttctgggggtatccctggtatctcatccggaaacacatctgagtattctcttaccacgggtattttagagagttcatcagttgactcagttacattagctgataaaagaacatacccttgaatttcattcttactggaataggaagcaatggagttcaaatataaacactgggtttgactattttctgaaatttctaaaggtaaaacaatggttttatttgaatagtctaacaatacatggttagctgcaagccaatccatacccaaaattatactaaacccagtcaaaggaagacaaatcaaatttgcagaataaagtttatgatcagtttgaaaaacacaattaagacagatttgacaagtattaacaggtttaccagtaggagtagaaacttgaagatcataaggtaattgagataaaggtaatgctaattgtatagcagaatcataagagatgaaagagtgggtagcacctgaatcatataatacaattaaaatagtatctttaattttgcacttaccctcgataagatttttagattgagatgcctctgttgcattcatggtaaagactcttccagtatgttgaggacgtgtagtgtcttgggaactttcagctctgcagttattagcatagtgtcccatctttccacatttaaaacattgaacactattgtgattgcgacaatcccttgccaagtgtcctatctttccgcatcgcacacaagtgggctgcactatggggcatggcctatctccatggatcttgtgacatttgttgcattccctgcctgaattctgccttgtctgaaattttctttgcttaaaattattcttaaatttagaaggctggggtcctaatttcttcatgaaattattacttgaatctcttttctcagcagacctctttttatattcttctattaatctacacttgtttatcagaacaccaaactccctaatttctaagggtcccactttctctaacatatcttccctcaatcccccttcaaacttcatacacttccagtgctcatcagggttatattgataggtggaggaaaatttaattaattcttcaaatttagctatatattcagacacactactattaccttgttcaagtctaagaaattcaagctccttagcatttctcactgatatggaaaaatacttaccatagaaggctgtcttaaacacctcccatgtaatctctacttcattacctgccagaatttgcttatgactattccaccaatactcagcatcagattgtaacatataagtagcataggttactttctgttggtcagaacaacttaatacagtaaatatcttttctatttctttaatccattcttcagccatgtctggattaagagtccccctaaagactggtggattagtctttctaaactcaacaaacttatgatattctacatcagtttcctaccttctattatcttgattagaattattattactatcttgatgattattattattctgattcatttgcatcatcatttaagtagctgccgcagcttgttgacttgctgcagttgcttgttgatttacagcagccgcttactcttgcatagccgctagcatctcatgaagaatatttatttcttcactgttaccaccggcttgggttgctgttcttcctctagttcccctagcagccatgaattcctattcactttaacaaaaatactgaggtgatcaggctcaatataaagttaaagtgtgttagaaggatgagtttaagtggaaatgaggctttgtcacctaagacttctagggtgatggaagctttgaccaaaaagttggaagacttcaaaatggaagtacatgcaaggcttgaagagattcaaaagaagcctcaaagaaggggtagtccaaatggtagtgtggatgaagaggctcataataatagaaaggtaagtgactatgcttccactcatggaagaaattattatgatgattggagtgagagggaggagaggagagaacatgatagaagagaaaatcataggagacatttgtaacaccccgtaggcctccgacgtgttatcattaataatatcagattagcgtataaaatatcaattaatcagttcagcggaaacataggatcgttttcttgatacattatgtatggagtaataatcatcagataacacatacaaatataacaggcccctgctgatccagtttatcaaaacacatgataagacagataacagagctttgggcagagtaacaacaatataaacatacacagggactcaggggaaagtctcatatacataatatccaagttctgtataatatatacatttcaggttcacacgacacccgatgctacaaaagactataatccctcagaagggtatacagaactgtacataacctagggtacaaacaccccagccctatcaagggtacaaaacataaacaatacaaaatgagccttcaagctcccaccgtggccatcagctaaaccacctagtctcaaccgggcctcctgccctgagactgatcttctcgtctagatacatcacttgaaaacatacaagtccccacacggggtgagataacgtatctcagtaagctcagggttcctgggaaatcattcccaccctgactcacagattcacaacacaagcatcagacaatcatatcaaacatcataactggccccatgtaccggccctctggccctcatcatatcataaacatcaatccataacaaatggcagagaaccctccatgccctggcagagaaccctctatgccgttccatgtggcagagaaccctccatgcccttggcagagaaccctcaataccctgtatttaatctattggccaacagactcatctcaattataatcattcatccaatacagatgcacacaatctcaatataatcaaatgcaaataatgccacagccaatgcatgcatcatgaatcatgaccaacactccccaggagtgtgtggtgtgcaatcaagcgggaattcattccccagaaacactgaacttacctggtaaggtctcagtctgcaatttcttcccaggtctgtggcccccgccaccaacagtcacagaatcaatgcctaatcaaggcataagcagactcatatcaatatccattcacaagacatgaaatcagaacatatcaaagcagaaatcccctatcctagggttcaagccaaatcagcctacactaggctgctctaagaccactcagggtccatcaggatggaatataatccatctgagtcatcctagactcactatatatatatatatatatatctatacatatgacccaagttctactcagcctcacaattcaattgtcatcagaaaggggctgaggtccactcaaagctctactctactagcctcttagctcagaacatcacaatcaaggctctagcctatcagaaagacatcaacaagtgactctacacaagtcatacaggcatatacagagccaagatccaaagttatcagaatcaaaaactgaaagctaatccttcatctattttaagccctgaacaactttctcaactggaccctgggctaattctagccccatctcagcatgggtcacaaaattcagaaaaccccaaaatcacagagacccaagagaacttgaattccttacctcagtggcgactcagaagatatcaggacaacttccccaagctctattgtcctttccaagccttgagtctcgtccactctcaagttctctgaggtttctctctggagaactcaaactctcactcaaatgggattccaaacaaaaggatgaaggatttcagctttctaatcggtttaaacaaggtttaaggtcacggggaagtgtttaggctgagaaatcaagtcctaagaagcttaaggacttcaacaatggaggttgggctaaggggaggaagaagcaatggaattttcttccatttctcgcgttttggcctttaaatcctgattctgccgacgttcccacgcgactcacttggattcccacgctacccacttgggatggcagacagaaaatgccatttctaggccacttcccacgcgactcgcgccgcacttcacgcgacccacttgggatggcagacagaaaatgccatttctaggccacttcccacgctactcacttgggcatccacgctacccacttgggaggccagacagcattggcatttttgcacatctggcgcgtgtcgcgccacacttcacgtgggtcgcgccgcaggccagaatagcctatttccgctctttctcaagcgtttaagcctcctttcaagggattccaaggcctaataatatctcctcatttataagcttcatcctaagcttatcatgcgcttaatccaggcttaaacatatgtttaaaaattcaagctattacaacattatcctaggaggatgaggagagaacatagagaagatgaagataggaggatggagagagatgagaggaatggaggattgggtggaatcaaaatcaaaattccaaaattccttagcactaatgatcctaatgaatactttgagtgggaaatgaaggttgaacaaattttctcatgtcaacattttgaggaagtcatgaactcttgcaactatagaatttggtggttatgctttggagtggtggagccacattcaaagagatatagttgggggaagaaggcaaagagtaaattcttgggaagatttgaaagcaagtttgaggggtagatttgttccagcttattatccaagagatgttcataatcttcttcaaagacatttccaaagttccaagagtgttgataagtattacaaggaaatggagttgatgatgatgagagctgtaattgtggaacataaagaagcaactatggctaggtttattcatggtttgaatagagaaattcaagatgtggtggagttatattcttatgacacaattgaggacctagtgcataaagctcaaagggtggaacaataaataaaaaggaggaaaatttcctattctaaatctagtggggctgcaacttctagttgggaagacaagccaaaaatggagagttctcaagtcaagagaagagatgagaaggtagaaaagtcaactaaaaagattgaacaagtaactccaacaaaaacgggaagcatcaaatgcttcaaatgtttaggaaaaggacatattgcttctcaatgtccaaataaaaaaactatgattttgctagaagataggaaggttacaagtgaatcttcaagttaatcatctagttcttcaagtgagaaagaaaaggcacttacacttgtggaggctgaagagggagatcttttaattgttagaagaatattgagaaatttttgcctagaaaaagaggagaattaaagagaaaatatttttcacacaaggtgcttggttaaagataaggtttgttcacttatcattgatggtgggagctgcaccaatgtggctagtacaagacttgtggagaaattacacttgccaaccacaaagcatccaaagccatacaagctacaatggcttactgaaagtggagaagtggtggtaaattctcaagtgctcattcctttttctattaatgcttataatgataatgttctttgtgatattgtacctatggaggctggtcatatccttcttggtaggccatgacaatatgatagaaaagtgatacacaatggcatgaagaacacttttgagtttgagcacctagccaagaaaattattttgaggcctttgactcctagacaagtgtgtgaggatcaaataaagatgaaagaaaacagaattaaggaattaaaaaaaaaaatactgcacctaaaaaagagaagaaaagtgagctacaaaagagaaaaactagtgagaaaaaaagaaagggaaaagaaaatgataacaaaagaattcatgagattaaagagagttttttcttgagaggaaaatatgtcaagagagttttattagcaagatagcctcttcattatatggtttctaactctctttgtttacatgttgaaaaggaaaagaaactatgtgttcctaaaagctttttgagagaacttttcatgagggaaactcatgggaacaatttcatgggacacattggtgtaggtaaacctttggctattttacataaacaattcttttggccaaaaatgaggcacaatttgcataagcttgtatctcaatatattgctcgtcataaagctaaatctagaataatgtctcatggtttctatacacctttgcttattcctaacttcccttgggttgacatttctaaggattttgtgcttggtcttccaagatccaagaggggaaaggattctaactttgttgttgttgatagattctcaaagaaggcatacttcatcccttgtcacaagagtgatgaaggttgtgaagtagacaatctcttcttcaaggaaatggtgaaacttcctccacggaagcaaaagagatataagcacaagtggaaggatagatttcttcaagagaatgttgagttgccaagtgagtacggtgtgaatactactttcaatgtttgtaatctttctttgtatgatgtaggtacaagtgaggaggcaaacttgaggacaagtttctctcaagaaggaggggatgatggacgatcaatgcaggctaaagagctaggactcaagtacttcaagatcatatccaatctaacttgtatctctaggaaaagcaagaagaagccaaaaagaagcccacaaaagtagtggaaacgcataaggagtgttgtctattttaacagattaaaaacatcctgtaacagattaaaagcatctttttgatacctgtaattgattacaagcatcctataatcgattaaatcagcctgaaaaatgaaagtatctctattttaatcgattacatgtcaaattaattgattattttggtcctaaatctgtttccaggaaggattagagcaaaataattgattaccaaaccaagtaatcgattatttaggttaaataatcgattacttgatcaaaataatcaattaaactagaagtttatgcagaaatgcgattttgtgaagccaaaggtcgttttgaacaaagcttgcactacaagctacattggggcttcatttcaatttgcattttacttacatttagggtcatttagcttgtaatttcgtgggctatataaaccacaccaaaattgtttgtaacaacttttggattcatcaaatacaattctgaaattgttgagagggtttctctcttgttcttattcaagaaccttcttgtttcttatcaatggctcctctgctattgtggtgattcttgcaagacttattggaattcctattccatggtgtcattccaattcattcctattcttcttccacaatccatttctacaaattagaaatctcttaaaaagccccaaattttgtgaaagtgcagaattctccatttcttggagtttgcttgaagattaggtttcattgcaaggaagatttgggaaacctaatgtctattggttgtagacattacaacagggagctgaagagaagatcaaggatgaagccctttcatttaaagattttagctttttacatgccattcaactgaaggcatttataatttgtaaagcagtttaagaggcttatcttgtgatccttgcatagcataaagcataaaaatattcatgcatacatgttttaagaaaagaacataaggttttcatgtttgcatttgaaaagaaacattctttagacgaattctttagaattgttaggtgtaaaagcgcaaaggaaatgtgggagatgttgaaagtaactcatgaaggaacaaatgaagtgaaaagatcaaggaagcatgccttgattcatgaatatgaaatgttcaagatgagcaacacagaaaacatttctcaactgcaaacaaggttcactcacattatcaatcatcttattggtcttgggaagatctttgatgctgaagaattgaacatcaaaatattgaagtgtctcacaagaccatggcaaccaaaagttacagcaatcaaggaatcaaaagatctatccaagatgtccatggctgcactttttggtaagcttcttgagtatgaacttgaaatgtgacagctaacacatgcataggatgcagagaagaaacacaagaatatacccttgaagactgcatcaactcatgtggaaaaggaagaagactcaagtgaagatgaaagtgatgaacatatgaacctactagtgaagaaattcagcaagttcatgagaagaaacaagaacaaaaagttgtcaaagtttaacagaaaaaatgacagcaacaacaactactccaccaacttcacttgcttcgaatgtagtaaacttggacacattaaatctgaatgtccagtctttttgaagaagcaacaaggtgagaggaagactagaaaggaagggaagccaaagaagacatacatagcgtgggaagaaaatgattcaactacttctgaatcaacaaatgagaatgaagaaacaaatatgtgcttcacctctacaataagtgatgatgaagaattctgaagtgctgaatcagagttaaattctaaatatgataatattgttgatgctttccatgagatgcatgaagaggcccaaaaacttgcacaaaccaataataggatgaaaggtaatctcaaatggcatgttaacaaaattgatgaattgcaatctgaactttgcaatttgaaagaagcaaatgaaaagcttgtttcaagttacaaagctaatcgatgtgtttgtgcctcatcatctttaaattttgataaatgcaatattttacaaaaagaatatgatgattacaaaaatagagaaggtgaaaaatatatgtttttgctttcaaaaaattcttatttggttgatcttttgaaaaggctttatagaggtaaatgcaatttaaatcaaatgctaagtgtgcaaaaatatgttggagatacttctggtttggggtacaaacatggatcaaaaccttttggaaaaacaaggtttgtgcttccaaaacaaaagtataaaaaaagcctttaaaaaacaaagcatcatcaattgactcattttgaaagattatcaaaaactgtcacttgcaattattgcatgaagagaggtcatacatcccataagttgttggatatagggggagcaacaagaagatgaagattctgatttagaagaaagttttgagcttttcacatgtcttgaagattgtaattcaaatgaagtatgagaggctaatcttttgatccttgcattgcatgcacataatcattaacatgcttaaatgttttcattaaagtatcaaagctattcatgtttttaaaaggaattaaatgggtaatgtttttggaaaaatataatcctactattttaatcgattacatgtcggttttatcgattatttgtttcacttttaaatttggaaaagccttgaagaacatattaatcgatttacataacttttgtaatttaatcgattaccataaattgtaatcgattacacaagcttgtttcacaatgaaccttactgctttaatcgattaccataaattgtaatcgattacacaagcttgcttcacaaataaacttcactgctttaatcgattacaactcaggttaatcgattattctgttcgttgtaaaacccaagatgaagctttgaaaactttaatcaattaatgacaatttaatcaattacataagtcattttaatcgattatttgtcacgttgtaattgattacagtatgttacaaaaagttgttataaataggataaaggcttgtctgaaaaattaacttgaatacttcgaattttctgattatacacaagccttctcaaagttagaaagtgattttctgggttaactaagttcttgtcccactctttaatcttcatgggtattgaatgatttcttgggcaagagttttgaaagaagttttgcaaagcatgttctgtaatttaactctggttgttaaaccacatgcattcatattcattggatcattaggttgtttctctccattatctctggttataaatttgtttttgtaatgtttgttatttgatgctattgtaaagagttttttgaagcttatgctagagtagggttctctagggaagaacatagtagtgttctttggttcttgatcactaggagtctaatagggttttagatttcttttctttatctagggttgataaagagtgtttggtataaagcttgtaagaattgaaatttataatagtggaactctaatctagtgtcgattagaagaaactggatgtagcttctcttgagaagtgaaccagtataaattcttgtgttgtttttattcctttatctctattagttatattgttgatttgttcttggaattattaccattactcaacaagtcttgttttgatgaattgatttcttgagttgagtgatttgattgattagaagcattcttggtttaaaagtgattaagatcctttgactttgatttttataaataaattttaaaataccaagtttaaaaaccaattcaccttctcttggttattgtgggtattcctattgttttcaattggtatcaagagcaggttcttgagtgttattcaagatcactatctttctttaaaagaaaatgaataccacacaaattaccttcaaggaaggtgcctccctcaaccgtcctccgatgtttgaaggagagcacttcagtttttgaaaaaatagaatgaaaatctttattcaatcaaatgacctaggtgcttggaatgcaatagaaaaaggtcatgttattcctataaaaactattggtaatgatatgattcccaaagaatgggatgaaatgactaatgctgaaaagagagttgttcaatatgattttaaaggtaaaaatatgattacttctgtactttcctctgatgaattctttagaattgttaagtgcaaaagtgcaaaggagatgtgagaaatgttggagataactcatgaaggtacagacgaagtaagaagatcaagaaagcatgccttaacccatgagtatgaaatgttcaagatgaactccaaaggaaacatatctcagcttcaaacaagattcattcatatagtaaatcatcttcttggtcttggaaagatctttgatgctgaagagttgaatatcaaaattctgaagtgtcacacaagactatggcaaccaaaagtgacagcaatcaaagaatcaaaagatctatccaaaatgtccatggctggactttttagtaagcttcttgagtatgaacttgaaatgtcacaactaaccaatgcagaagatgcagaaaagaaacaaaaaagcatagctttgaatgctgcatcctcaaaggtggaaaagatggaagactcaagtgaagaagatgaagtgaacaacatgaatctaattgtcaaaaagtttagcaagttcttgagaagagacaagaatagaaagttcacaaagaacaacaacaaaaagagtgacaccaatttcacttgctttgaatgtggtaagcttggcaacattaaatctgaatgctctatctttttgaaaaacaaggtgaaaacaagataaagaaagaaggaaagcctacgagagcctatatagcttgggaagataatgagttaacaacttctgaatcatcaactgaaaaagaagaagcaaatgtgtgtttcacttccacaattaatgaagatgatgaatcctcaagtgttgaaactaaggtaaattctgaatttgatcaagttgttgatgcttccaataataggctaaaagaaaatcttagatggcatgtcacaaaaattgtagaattgcaaactgagatttgtaacctgaaagaagaaaagaaaaaacttgtttcaagttacaaaatgaatggatttgtatgtgcttcttcttcatctaatgttaacaaatataatgattttcaaaaagattttgatgaattcaaaaaaaagtcaaggtgaaaaacatatggtagtactttcagaaaataattacttggttgatatcttgaaaaggctttataaaggaaaatgcaatttggctgaaatgctaagtgtgcaaaaatatgctggagatacttttggattgggttacaaacatggatcaaaatcttatggaaaaaccaaaacagaaatatcaaaaagctatttcaaaaccaaggtttaatcacatgacttattttgaaagaacatccaaaactgtaacttgtaactattgtatgaagaaaggtcacacatctaatgtaaaatatgggaacacttcacacttaaccaagaggggggtgaattggttagtcttggtaatttaaaactttttggataatcaaaatcagagtttttgcccttttgggtctttatcacaaatacaaccaagaacctttatccaagatcaacccaagacttgtaatgcttcaagaaacaagatataaaacagaattcacaaagaaaacaatcaaatatgtagaatataaatgaacacacaagaattatactggttcacttcaaacactatgaagctacatccaattttcttctactcaacactagagtagagttccactattgcaaataatattcttacaagacaattacaaacttttgtttatcaaccctagataaagttcagaagtctaaaacactattagacccttagaagccaaaacccacactgagaacactactcagttgtccttagagaaacactatctctaaccttgcaagaaacccacttacaatagaacttcaaaaataaagattcaacagaaagtttacaaccacaaagagtaaggaaagaattcacctgatgattcaaggatgatatgcataaggatgaaatacccaggttgaatgtaaacacaatatgcagaataagcctttccttaagctttgtgaagaattgtcttgcttcactaaatcctaaagacccataatggttatgatggaagcaagaacttatgaacccaaaaaattcactttgtgaaagcttagaatgtctattgaatgctcagaagtcaaaaactcaagttcttttaaatcagaaaggcacgggttctatttatactaaaaactgtaaccatcataatcgattaaaagcgctccagtaatcgattgtttagcatttgtaatcgattacacacgctgccgtaatcaattaaagtgttcatagcaagttctgggttacagcaacaggtcatttaatcgattatcccgacttgtaatcgattactccagaagccttctaaaatcagtttgtactaagtaatcgattacaataatcggtaatcgattaagacagacattctaaaaatcatgttttagtaatgtaatcgattacaacaaatggtaatcgattaagacagactaagtgcaaaacatgaaatgaactaagtaatcgattacaatgaatggtaatcgattaaggcagtgtgatcactttttctaagtatgaagtgtaatcgattacggatcggtggtaatcgattaaaccagtcactaaggcagattatcagtatgctaagttgaaataatcgattaacccgatggtgtaatcgattaaattgttcttgatatttttccagaaagcttgaagaacaatataatcgattctttgtgtatattaatcgattaaaccagtgtagggctatttctcaaaaaaaaaaacacttaccttcttttaagtttcaaaacaattacttaatgcctttgtgatgtgatgctaagatgcttatgaatggtatgaatgcagtgacatgaatcatcagaattctttctttccttttacaattaatcacaagcttctcttcaagccttcaagcatgttgaaagtcaaaacacttccaagtcttcaaattgcttcaagcttcaagtagctccccctcaagtcaacaatctccccctttttggctttaaacatgccaaatttgaaattgagaagcattgggtcttgtgattaaatggagagacttcataccatatttctgaacttccttagcacctgaaaaattcaaattcctttgcaagaacaagtgttaaagacatatgtttttaacttagcattcattcccaacatatatttgttcattgcaatcaatttaagcccttaactccccctaactttttcaaattatgcagttcaattttcagttcagaaaatgcacaaaaaacaggggcaaacagagtatgatgcagagcatgctggttttcaatttttctcccctatttgtctttttaaaggaaaaaattgtaaggcacaaggaattaagagtgaatagaaacataacattgcattaatttgaagttaaggagtacattttaaagcttagaaacagaaaaacataataaaagaaacggagtacattttaaacattaataactaaggcttaaatttctttagattcttcatccatccttagtgtggcctctatgtcatctagcctctcattaatctccctaaaagagccttgaatttctgccttgaagtcatggtgcatctgcagaagtccatccatcttggccagcataagagactcaaattgagagttaagtggcaactcagattggtctgcttcacttgcagaaccagccaagtcttcactatcagcaacaaatggttcctattgctgaggcatctatggaggttgtactcccatcacccatccatcaggggtcttgtgcaatccaagctttgacagatgcttctcttgaatgaggctgttggaggagttggtgttgtccaccacttcattagaaacatcaaccccaaaatggtcaatgaatctagacactaagacaggtatgggaagggatggttgacaagccttttggatttcatcataatttcttggaaaatgagtacccagttcataagaatggaattgataagaccatacatgagttgtaggtcctcatctgtggcttgggcatagttggttgctcttggagataaaatataagttatgagatagtggaggagtctgttttctggtgccataggaccagtgcttagcttattcctaataggttggttggggtcagtaagggattccctataggttcccatcttggtatagccaccaggggtctcatcaaatttcctctccccctcattgacaaccccaacaactgtctcccaaatctcaggagtaatcagcatttctacccccttgacagtggatttaaaatacccttgcatagagccctttccacatgagtagaaaactctaacaagatcagggtaataagtacccttcatctccatgaacctcctaaggccttgggtttctaaaagagcaggtaagacaaaaccttccttgataaaccagtctaggcttatatatttgggtgagcagatgggtttggtggcactatattgcacataagtcattttatccgcttctttggtgaaccaaagactcaatctatcaggtggaggttgtttgaagaagattctcccaccttccttttcccagttctaaccttttttggtgtagacattttgaataaagcagagaggaataatgtaggtttgaaggttacagaatgaaacacaagagagaattgatttttggtgcaaggaggatggaatcaaaagttcactatttataggcaaagattaagttccaaacgaccagatttttcaaaaatatagctgttataggtagttaatgcaggttaatgatggttaaagcacaaggatcagttgatagggcggttacgaaatcccagaaaactgtcagaaaacgcataacaacttgaataattgattaaactcttaaagtaatcgattattccagagcaacaaataacaaaaattacacagtgtaatcgattacattaatggttgccagaggttgatgatgatcagtaatcgattatatgtcttatgtaatcgattataagcttcatgatagcagactcaacctggattagaacattttaatcgattaacctgagtggtaatcgattacttccgaatgatagaatttttgatacatgaagtgtaattgattacaagcttattgtaatcgattattacagcgacatagtcaattcctaacttgagttttgaatgatgtaatcgattaacccgataggtaatcgattatgtcagaaagataaaatttttgatttatgaacagtaatcgattactacattggtgtaatcgattacttgagcatgattttcatactgaatgtcagttttaatgaaattaatcgattaatccgagtcttaatcgattattaaagtacgtttagcagaaaacagagcattttaaaaatctgatacaacttttcatacaatttaacaatgatatggcaagaggaattcaaattttcacacaaatcatataaacaagctagaaaatattgttttcatctaggattcctagcatgtttctaagagtgtaaaatctatctttaggcaaaggttttgtaaatatatcagcaagttgatgatgtgtatcaataaattttacctttatgttacctttctgcacacgatctcttataaagtgatgtctaatctcaatatgcttggtccttgaatgcatcataggattgatggcacttgtgttgtcacacagcagtgaaatttcctttaaatcaactccatagtcttgtaattgttgcttgagccatatactttgtgcacaacaactaccagctgaaatatactcagcttctgcagtggataaagctacacatgcttgtttcttgcaacgccaagaaatgagtgagcttccaaggagatgacaagttccactagtgctttttctatcaagcttgcatcctgcaaaatcagaatctaaataaccaattatatttatagatgcatctctaggataccaaagcccaactttgggtgttgccttgagatatttgatgatcctctttacatctgtaagatgagactcttttgggtttgcttgatatcttgcacataagaaaacacttaacatgatatctggtctactagctgtcaaataaagtaatgagccaatcattcctctatacttggattcatccactttctttcatttttcatctgaatcaagataggttgaagttgccataggagttgcagcatctttgcttttatccatttcaaacttcttgattacttcaaggcaatatttagattgattgagaaaagttccattcttcaatttcttgacttgtaatcctaggaagaatgtcaattctcccatcatagacatctcaaactcatgttgcatagatacaaaaaatgctttacaaagcttttgattagttgaaccaaagattatatcatcaacataaatttgaaccattaagatatcattccttttccttttgataaacaaggttttatcaacattgccctttaaaaaagattgatcaagtagaaacttactcaatctttcataccatgatctaggtgcttgtttcagaccataaagggctttcttgagtttgaaaacatgattaggatgctgaaaatcagaaaatcctggaggttgttcaacataaatatcctcatcaatataaccattcaaaaatgcacttttgacatccatttgaaaaagtttaaaacccattatgcatgcataagcaagtagtagcctaatagcttccaaccttgcaactggagcataagtttcctcatagtcaataccttcctcttggttgtaaccttttgcaaccaatctagctttatttttgactataattccactttcatccagcttgtttctacccattttgtaccaataggcttaatggatggaggtctaggaacaagttcccaaacttcatttcttttaaattgatttaactcttcatgcatggcatgcatccaatgttcatcttgcaaagcatgattaatatcttttggttcaatttgagaaacaaaatccatgtcacaacataaatttctaagtgaagatctagtagaaactccctttgatacttcaccaatgatgttatctagtgaaagatctcttgtggttctccactttttaggtgttgatgaaccttcttcagcacttggttcattcttctcattgatagacattttctcaagctgaatattctgctctatttgacctttatcatcatcacaaactttttcctcttttgaggggttagattcatcacaaattacatggacagattcctctatgcacatagttcttttattgaaaactctgtatgccttgctttgtaatgaatatctaagaaagatagcttcatcagcctttgcatcaaacttcccaagtgattcctttccattatttagaacaaagcatttacagccaaaggttcttaagtgagaaacattgggctttcttcctttatacaactcataaggggttttcttcaaaataggtcttatgagaagtctatttaatgtataacaaacagagtttacggcatcagcccaaaaatatttgggtaaatttgtctcatttagaagtgtcctagcaccttctttgagtgatctgtttttcctctccacaacaccattttgctgaggtgttcttggagttgaaaaattgtggttaatcccattttcctcacagaaattttcaaaatgttcattttggaattctccaccatgatcacttctaattgagacaattttacatcatttttcattttgaacaagtttggctaattttcgaaaagaatggaaagcatcacttttggatttcaaaaacaaagtccaagtgaatctagagaaatcatcaacaataactaatccatagtaattgcctcctaaactcatagttcttgaaggaccaaataaatccatgtgtaaaagctcaagtggtctagaggtggaaactgataaaaggacatgttaaatatgataaagacttaccaaataaatccatgtgtaaagcacttggtggtgagaaagacttaccttcatctttatctaaaactgataaaaatgacattcttgaaactgcatatagtctattaattctgcatttgagtgatattagacatgttaatgatgaaactactgctgctggtatttggttaaaattagaatctttgtatatgactaaatctctctcaaacaaaatatatctaaaagaaaaactgtttggtttcaggatggaatctagtaaatctttagatgataatttggatgagtttaagagaataactattagtcttgctaatattgatgaaaagattactgatgaaaaccaagctattattcttcttaatgctttgcctgattcctacaaggatgtgaaatctgctattaagtatggaagagagtctttgtcattaaaagatgtaataggagccttaaagtctaaagaactagaaatggtagtgaataagaaggtcaatgcagagggactgtttattaaaaagaagtttaataaaaagagtcagtttcaaggaaaagaaaaaggaaagaacaatactgaaaataagtttaagccacctgttaagagtaaggtgacttgctggttgtgtcataaggatggacacattaggaaaaattgtccagaaaaaggaaaaggtcaaaataatgggaataggacagattatgctaatctgactagtggttttgaggatagtaaggtcctagctgtgtctaatgcttcttgtgagaaggagtgggtgatggattctggtagtacctgccatatgacacctgaaaaggactggttaatctgttttaggcctgttaatggtggaaaggtgatgatgggaaataaccaaaactgtcaagtagaaggaattggagctgttaggtttaggatcggaaatgggactgttaaggctctcaaggatgtgagatgggtccctaatattaggagaaacctgatatctctaggaatgttagataaaagtggttaggccacattagtaatcaaggattacaagagttatataaacaaggtattttaagttttaaaacattttctcctattgatttctgtgaaacttgtgttttgggaaaatctcacagattaaagtttcaaataggaaagaatgaaactaaaaatatattggattatatacactctgatttgtgggggtcacctaacattcctagttcactttctgactgtcattactttctttctatgattaattctcattcaagacgtgtgtggacttattttttaaaacaaaaagatcaagcttttgattgttttgaagactggaaagtccaagtggaaactgagacaggaaagaaggttaaagcattaagaactgataatggattggaattctgtaattaccaatttaatgatttctgcaaacaatgtggtattctaagacatagaacttgtgctgaaacacctcagaaaaatggcattgctgaaaggatgaatagaactattttgaataaagttagatgcatgcttgctgattctggtcttagaaaatctttttgggcagaagctatttctactgcttgtcatgttataaacaggtcaccttcatctgctattaatttcaaaactcccatggaaatgtggtatggtaagcctcctaacctgagttatatgaaaccttttggttgtttagcttatgttcatactaaacaggataagttagctcctagggctcttaagtctatgtttgtgggttatcctatagggacaaaaggttataaactctggttaatatctgaaaataaatgtgttgtcagcagaaatgttgtatttgatgaactgacattttataaagatattgtgcaggatactgggcaggttcaagaacctagaaatgtccagttggaggtggagaacaccactggtattgattctaatctggttcagaatcatggtgaaattgaagatcaagttgacatacttgatcagcttgctaatgattaacaaactagtgaagaaatcaagaggactccaacctcaatgattatcttctgactagagatagagttaggaggattattaggcctcctaacagatttgcccatgctgatattgttgcttttgctttgcaggttgctgaaatggttgaacaagaagaaccagcaacttacaaagaagcaatcaatatgaaatctcaagagagatggctgagtgcaatggaggaagagatctcctcgttaaagaagaatctgacctaggttcttgtggacagacccaacgataagaggatcattggatgcaagtgggtcttcaagatgaagcctgaagtccctggattggagaaggccaggtataaggccaagttggtagccaaaggctactcacaggtagaaggagtagattataatgaaattttctctcctgtggtaaaacatacttctattaggcttattttatctgttgttgctattattgatttagaattagaacaacttgatgtgaaaactgcttttttgcatggtagtctagatgaacagatctatatggagcagccagaaggcttcatacagaaaagttctaaggacaaagtctgtctgctcaaaaggtccctatatggtttaaaataggcacccaggcagtggtataaaaggtttgatgattttgtcttgtcacatggatttactagatgtaagtataatcgttgtgtctgttataagaaagatagtgaaaataaatacatctatctgttgatctatgtggatgacatgctaattgcttctcatgatattgagtgtattaataggctgaaatgctgaaggaatttgatatgaaaatccttggtcctcctaagagaatcttaggtatggatatcgttagaaatagaaaagaaagaatcttatctttatcacaggctgtgtatgttaagaatgttgttaagctcttttctatgcatctctgtaaatctattagcttgccattagctgctcattttcgtttgaaatctgtatgtggtgatttaaatgaagatgaatctgtctatatgaaaaatgtgccatattgtaatgcaattggaagcctaatgtatgcaatgattagtactagacctgatattgcatatgctattagtgttgtgagtagattcatgagtaatccttcaaaagatcattggaatgctgtgaaatggattctgagatatcttaatggcacttctgatttctgtttgaattttactataaatgaatctaatgagttttctgtgaaaggctattgtgattctgactatgctgcagatttagacaaaataaggtttttatctggtattgttttcactattggtggaaatgttgttagctggaagtcaaatcttcagcatgtagtatctctgtctactactgaagctgagtatatggccctgtcagaaactgtaaaagagacactatggttgaaaggaatactttctgaacttggattaggtgatggaattccacaaattatgtgattcacaaagtgctattcatttatctaagaatagtgcttatcatgaaagaactaaacatattgatgtcaaactacattttattagagatgttattgcaggtgataaggtgaaagtggagaaaatatccattgtatgcaatccagttgacattctgactaaagttgtacctcttaacaaattcaaggatgccttgaaattgttaaaagttcaacaacaatgatttctttctcttatctatgttatttctgttttctaattgtttacttggaaaattactaatgcaatcttcttgttttgtaggttctaatctgtttctctttgtatatgtttgttctttttttttcctgagtcttagtgttttagcgtcctctggtctggcattgaacttatagtccctagtgtcttctgtttgtgtatgtcttcttgtgcttcaaggtggagtttgttgggccttgtgaagcccaagaagtggctttattgaaactgtgcgttttggttatatttgctgtcatatatatacaacttttattcacaaagtgctacacgtttttcttattgccttttacgcttctaatttggaatagactccagaagctttgcttttctctcttttcatctctcttgttttctctttaacctagatctgctagggtttgcgtttttctgcataaaccttgagcttagtgtgttgttttgagttagagtgatgatgtagtagtatgtgttccttgtgttcttcgttcttgctgtttggtgttgcaggtatggttctttctctctagggtttggtccggtttgtgttcttgaggcttttctctgtaaggaactggttgagagaagagtagcaagttgggtaatgtctggtcttgacattggtgaagagtggttctcttttgtaccctgtaaatcttgttttctatttacctgtgatattgatgccatgttcttgttgtaagcttggttgtgtaagcaagaggaacattgttgtaatattcttgtaatattggtgtgagtaataaaggggtctaaaggttctttgtctttggataggatttatcctagttactgaaccaagtaaaatgctcttgtgttttctttctctttaattttctgcttccgcttataaagttcaatttgattttgcgctgaaaaactctaacaaacttcaatgttgcctcattgttgatttgaccaatgactaatgcccaatctctcattcttcatgctttgcttatgcaagcttaatgaatgatgtagttttacctctacttacatcaaccacataaaaattaaaaaaggaaatgaaaaacatctttgagttgtttctctgttttgttttttaaaacagttatctttataagaagttttctaaatttgttagattttggatgagaaatttattgatgagtgaaataaaattagtttttaaaataaataaataaacataaaagtgattcaaacagacctagagcatcttcatctttattgttaaatctcaaaataaaatcttaagttacttttcggttgatctcataatatcatatgtgattcaagatttctttcattttttgctccaatggtgtatttatgaacattagattcttgagctactttgttttttatttttcaattattatttcttttttttttgtcactaaaatgcttctctcttccattcctcatagttacgcatcattttaccccctaaacccacaagcacgttgtttcccgcttcttcctctcctaagtccccaaaacaaccacatcaacaacgatctcccatcttctttctagaatcatgctcacaggaaatcgcctatctcgcctcctctccatcggtctcacttccatggtcactgatctcataagaatcacacaaattgatgatctccatgcatgctcttattcaaatccacactacatgttgctccacaattgctagcaatggtcgtcgtgcattgcaatgcagcctctttatatctagatctttaattttattttattcatttataaatataagattttgattgttgttgttgttgttttgatctattgttgttgctgttgaaaatgatacggtgttgtgttcttctgtcttcctcttcattttcattgcttccctctcaaaattgttagtgccagagattagaaaattaattttttagaaagtgatgcagattttcagggttcttgtggaagaacccttcctccacactagagatcctggatccatctctggcggtagatcttgccaatatcaaatcttgagctcaaaaatctagctcaagacccagcaataaagatgcttttactggcttaggtattgaaattgaaaatagaatgaacacttatgcaaataaccaagagaggggtgaattggttttacctcagagtttttaaaatttaaaacaaattttatacacagcggaagactttgaaagaaggattgtatcttaaccaattaagaaatcaaacttttaaaatcaacttttatctcaatcaacccactcttgagcttcacccaatcttgtgatgtaaacaaatatataatacttcaagaacaatatgaatatgaacagaaaattacaaatacacacaagatttatactagttcacctctcaatcccggaggctgtaaaatataggaacacttcacacttaaccaagagggggtgaattggttagccttggtaattttaaaaattttattaatcaaaatcagagtttttgcccttttggatctttatcacaaacacaaccaagaacctttattcaactcaagaattaatccaagaatgtaatgattcaagaatgtggtaaatagcagaattaacaatcaagaatgattcacacaatcaattacgcaaaattaaaataacacacaagagtttatactggttcacttcaaacactataaagctacatccagttcttctactcaacactagagtagagttccactattgtaaattttagttcttacaagattattacaagtctctctttatcaaccctagataaagttcagagatttaaaaccctattagatccttagagaccaaacccagctgacaacactacccagcaacacttagagaaacactatctctaaaaaatacaagcaagaacccaaaatacaatagacaagtcaatacaaatttcaacagagaattacaacattcaaagattaaggaaagaaatcacctgatgatccaaagattgatatgcatgaaatgaatttaccaggttgaatgcaaaaaacaaactcagaacatggctttccttgatctttgaaaaagaaaatcttgcttcactcaatccttaaacacccataagagttttgtgaaagcaagaactcaatgaacccagaaatatcacttagagagtgtttagaaaactttagaatgctcagaatacgaaaaattcaagttttgaaatcagctgagcattggatctatttataataatttttgtaaccgcttgtaatcgattatttagcatatgtaatcgattacacacgctcttgtaatcgattaaagtgttcataaggattctgggtaactacaacgagcaatttaatcgattatcccgacgtgtaatcgattaaacccggcaatgtataaaatgtgtttgtactatgtaatcgattacaataattggtaatcgattaaagctaacattatgaaaaacatgctttgaactaaataatcgactacaataattggtaatcgattaatccagagtgatgatataatctgtatgggtaatgtaatcgattacagattagtagtaatcgattaaaaagatcactaaggcagattatatttattctaagttaaaataatcgattaatccgatagtgtaatcgattaaaatgttcttgagaattttccagaaagcatcaagaacaaaataatcgattctttgcttatattaatcgattaaaccagtgaaatgttatttttccaaaagacacttagtttatttcaagattcaaaataatttcctaatgccttgtgatttaattcttaagcttatgaatgatatgaatgcaatgacttggaacatcagaaaatttctttccttttacatttgatcacaagcttttcttcaatgcttcaatcatgttgaaagtccaaaacacttctttgtcttcaaaatctctttgtgcttcaagtaactccccctcaaatcaacaatctcccccttttggctttaaacatgccaaatttgaaattgaacagcattgggtcttgtgattaaatgaagagacttcatatccttttactgagctttctcaatacctaaaaaattcaaagttctttgcaagaacaagtgttaaagatatttgttttcgccttagcaatcatacatacaatatagttacataatgcaatcaatttgaaccactaactccccctaatttttgaaaattatgcatttgaaattatagttcaaaaaacgcaaaaaaaaaaaaaacaagggcaaacagagtaatatacagagcatgcttaaattcaattttttctccccctatttggctttttaaaggcaaaaatgcaaggcacagcgaattaataatgaacataagcataatattgttttaatatttgaataagaagtacatcataaggcttaaaattgaaataaaaacagagtacactaaaacagaaataactaagactttaaaaatctacagattcttcatccatcctaagagtggcctcaatgtcatccagcctttcattaatctccctaaatgagccctaaacttctgctttaaagtcatgatgcatcagcagaagaccatccattttggccagcataagggattcaaagtgggagtgaagaggctgttgagaggtgtccccctcacttgcagaatcagccactggttcttcactatcagccacaaatggttcttgttgttgaggcacatggggaggctatccacccatcatccatccatcaagagtcttgtgtagtccaagcttggacagatgcttttcctgaataaggctgttggaagaattggtgttgtccaccacttcattagagacatcaatcccaaagtgatcaatgaatcttgagatcagaacaggatatggaaagggatagttgacaagtctcttggctttcatcattacttcttgaaaaataagcatccagttcataggaatggaatttgtgagaccatacatcaattgtaggtcctcatctgtggcttgggcatggttggttgcccttggagttaagacataagtaatgagatagtggaggagtctgttttctggtgccataggaccagtgcttaacctgttcctaatgggttggtttgggtcagtgagggattctctataggttcctatttttctatagccccttggggtttcctctccccatcattgacaactccagcaattgactcccacaactcaggggtgatgatcatttcaacccctttaacagtagatttaaaatgttgaccatccatagagactcttccacacgtgtaaaagactcttacaagatcaaggtagtaagtacccttcaattccatgaacctcctaagaccttgggtttctaagagagcaggaatgacaaatccttctttgacaaaccagtcaaggcttatatatttgggtgagctgatgggtttggtggcattatattgtagataagtcattttatccgcttcttggagaaccaaagactcaaacgatcaggtggaggttggggttgagggttagaggaagtttcaccaacctttcttttcccagtcctaactcttttaggtgcagacatattgaatcaaaaatgaaggataaggaaagcttgaaatattgagaatagaaggcaagagaaaaagggtttttggtgcaagggagagatgattcacaaaatcactatatataggcaaggatgaaacactaaactttaagatttttcaaaaatatagttgttataagcagttaatggaggttaatgatgatttaggcattacagatacccagaaaaattgtcagaaatcacataacaacttgaataagcgattaaatccatgtgtaatcgattatttcagatcagcaagttttcaaaatttacactatgtaatcaattaatccgtgaggtaatcgattacatttgacatttccagaggtagaggatgacttgtaatcgattatatgattcattaatcgattatttacatcaggataacagtccagacatacatcatgacctatgtaatcgattatcccgagtggtaatcgattatatcacacagacagatattttgcaaacttgaatgtaattgattacaatgtagtggtaatttattattacagcgacatagttaattctaacttgagttttaagcaaggtaatcgattaatccgatgagtaatcgattatttccgaaggacacaatttttcatttattgaaggataatcgattacaatgtagacataatcgattacttaatcataactttcatactgagagcaatttttaatgaatttaatcaattaatacgtagtataatcgattatttctatcagattagcaaaaaacatagcattatgcatgatagagctttctaaaaatttaatcaccaaggtaacatttggcattgattatagcacacgaattttatataacaaacaagctagttaatgttgttttcatcaaggatccctagcatgtttctaagagtgtagaatctatctttaggcaaaggttttgtaaatatatcagcaagttgatgatgtgtatcaatacattctaccttgatattacctttctgcacatggtctcttataaaatgatgtctaatctcaatgtgcttggtccttgagtgcataacaggattctttgaaatatttatagcacttgtgttatcacagagtaatggtatctcctttagatcaactccatagtcttgcaattgttgttgagaaatagactttgtgcacagcaactaccagctgaaatatactcagcttctgcagttgataaagctacacaagcttgtttcttgcaatgccatgaaataagtgaacttccaaggaggtgacaagttccactagtgcttttccgatcaagtttacatcctacaaaatcagaatctaaataaccaataatgtttatagatgcacctttaggataccaaagcccaactttgggtgttgccttaagatatttgatgatcctcttgactgctgtaaggtgagactcttttggatttgcttggtatcttgcacacaagcaaacacttagcatgatatccggtctactagctgtcaagtatagtaatgagccaatcattcctctatacttggattcatccactttctttcctttttcatctgagtcaagataaattgaggtagccataggagttgcagcatctttgtttttctccatttcaaacttcttaatcacttcaaggcaatacttagattgattgagaaaagttccattcttcaattgtttgacttgtagtcctagaaagaatgttaactctcccatcatagacatctaaaattcgttttgcatagctgcagaaaattctttacaaagtttttgattagctgaaccaaaaataatatcatcaacataaatttgaaccaataagaaatcattgtcttgccttttgataaacaaggttttatcaacattgccccttgtgaaagattgttcaagcagaaatttgcttaacctttcataccattatctaggagcttatttcaaaccataaagtgcctttttaagtttataaacatagtttggatgtttgaaatcagtaaatccaggaggttgttcaacatatatgtcctcctcaatgtatccattcaaaaatgcacttttaacatccatttgaaaaagtttgaaacccattatgcatgcatatgcaagtagtagcctaatagcttccaatcttgcaactggagcataagttttctcatagtcaatgccttcctcttggttgcaacctttagcaaccaatctagccttatttctgactataatttcactttcatctagcttgtttctaaaaacccattttgtaccaataggcttaatagattgaggtctaggaacaagttcccaaacttcatttcttttaaattgatttaattcttcatgcatggcatgcatccaatgttcatcattcaaggcatgattgatatcttttggttcaatttgagaaacaaaggccatatcacaacataaatttctaagagaagatctagtggagactccctttgatacttcaccaatgatgttatatagtgaaagatctcttgtggttcttcactctttaggcctttgatttaaagttgatggaccttcttcagcactagattcattcttctcattgattgacatcttctcaagctgaatgttctgttctattttacctacatcttcatcacaagctttttcctcttttgaggggttagattcatcacaaattacatggacagattcttctatgcacagggttcttttgttgaagactctatatgccttgctttgtaatgaatatccaagaaaaatggcttcatccgcctttgcgtcaaactttcctagtgattcctttccattatttaaaacaaagcatttacagccaaaagttcttaagtgagaaacattgggttttcttcctttatacaactcataaggggttttcttcaaaataggtcttatgagtaatctatttaaagtataacaaacagtgtttacagcatcagcccaaaaacattttggtaaatttgtatcatttagaagtgttcttgcaccttcttcaagtgatttgtttttcctttccacaacatcattttgttaggagtgttcttggagctgaaaaattgtcgttgattccattttcctcacagaaattttcaaaatgttcattttggaattctccacaatgatcacttctaattgagacaattttacatcctttttcattgtgaacaagtttggctagttttctaaaagaatggaaagcatcactcttggatttcaaaaacaaagtccaagtaaatctagagaaatcatctacaatgaccaatccatagtaattgccccctaaactcatagttcttgaaggaccaatagatctatatgcaaaagttcaagtggtctagaggtggaaacaatatttttgctttgaaaagatgttttggtttgtttccccttttgacatgcatcacatagtttgtccttctcaaatttgagtttttgtaggccaatgactaagtccctcttaatgagcttattcatatgatgcatattgatatgactagctctcctatgccacagccatgtttcatctattttactcatcaagcatgtggttttgtgaaataatgcatggtctatagaaagcaagtaaacattacctttccttttgctaatgtaaattacctcttcactcttaccatcacaaattaaacagcaatcttgattgaaggagattttatagcctttgtcacataattggataatgctaagtagattgtgcttcaacccctcaacatagagtacattgctaattttggtattcaagctatcaccaatgctaccttcaccaatgatttttcctttgttgttatctccataagtgacattgcccccatctttaaaaataagattcttgagcaaggacatatcaccggtcatatgtcttaagcatccactatcaagataccatagagaggatcttggtctaagacatacctacaaaaggatcaaattacttcaaggaagaaggtacccatttgcttttgggtccaagtgggttagctgttttctttttcttttctatctaaatgcactcctcatttgggacataaaaccttcttgcaaaacaatggtaagctgtatacctctttccatacaatagtgacaagttacaacattgaatgattttctagagaacctcttttgattgactcttgacttcttctttttcttctgctttggaggtacaaatgtagtcttttggacatttttaaagctccttttataccccaaaccagaagtatcaccaaactatttttgggcactcaacatatcatctaaatcacattttcctttgttgagtttttccaagacgtcaatcaattcttggttctttgaaaccagctgcaaatatttttcttcttgattgattctatactcatcaaacactttttacagcatttcatacttgtcactagatgtggaggaagaggtacaaacacatccacttgatttgtagcttgaagtaagtttctcattttcttccttcaagttacaaatttcagtttgcaaatccattattttagcaagatgatcctcaaaactatttttaagcttgttatatgatttagctagctttttggcctctttgtgcatttcttgaaaagcaaaaatagcttgatcaagttcagatgttacctcatcatcatctagaagatcatcattttcttcattgacaatagaggtgaggcacatgttggcttctctaattcagtagaggattcaaaggttgaagattcattgtcttcccatgcaatgtatgatcttcttgctttagcttccttcttgcctttgctatcttgttgctgcttcttcaagtagattgagcattctgattttatgtggccaggtttgccacattcaaaacaagtaaagttgttgtcaatctttttattgttgctatagctgttgttggtggaattgttcttgttgtttcttgtgaaccttttacccttgttcttcttcagaaatttgttgaacttctttacaatcaaattcatgctttcatcttcttcttcatcactagagttttcatccttctctactttaggtgctgcaattttcagtgttattcccttgctttttctttttgcatcttcaccaaaagttagttgagacaattcaaactcatattcaagtaacttaccaaagaaggcagccatagtcatttttgaaagatctttggattccttgaagctacatccagttcttatactcaactctagagtagagttccactattgtaaattttagttcttacaagattattacaagtctctctttatcaaccctagataaagttcagagatttaataccctattagatccttagagaccaaacccagctgagaacactacccagcaaaacttagagaaacactatctctaaaaatacaagcaagaacccaaaatacaatagacaagtcaatacaaatttcagcagagaattacaacattcaaagattaaggaaagaaatcacctgatgatccaaagattgatatgcatggaatgaatttaccaggttgaatgcaaaaaacaaactcagaacatggctttccttgatctttgaaaaagaaaatcttgcttcactcaatccttaaacacccataagagttttgtgaaagcaagaactcaatgaacccataaatatcacttagagagtgtttagaaagctttagaatgcttagaatacgaaaaattcaagttttgaaatcagctgagcattggatctatttataataatttttgtaaccgcttgtaatcgattaaatgggctcctataatcgattatttagcatatgtaatcgattacacacgctcctgtaatcgattaaagcgttcataaggattctgggtaactacaacgagcaatttaatcgattatcccgacgtgtaatcgattaaacccaacaatgtataaaatgtgtttgtactatgtaatcgattacaataattggtaatcgattaaagctgacattatgaaaaacatgctttgaactaaataatcgattacaataattggtaatcgattaatccagagtgatgatataatctgtatgggtaatgtaatcaattacagactagtagtaattgattaaaaaggtcactaaggtagattatatttattctaggttaaaataatcgattaatccgatagtgtaatcgattaaaatgagaattttccagaaagcatcaagaacaaaataattgattctttgcttatattaatcgattaaaccagtgaaatgctatttttccaaaagacacttagtttatttcaagattcaaaataatttcctaatgccttgtgatttaattcttaagcttatgaatgatatgaatgcaatgacttggaccatcagaaaacttctttctttttacatttgatcacaagtttttcgtcaatgcttcaatcatgttgaaagtccaaaacacttctttgtcttcaaaatctcttgtgcttcaagtaactccccctcaaatcaacagaggctacatccagttttacttctaatcaaccttgattagagttttcactataacaaaatgaatatctttacaagcaaacacagatcttttttacccaccctaggtaaaattcaaaatctaaacctatagacttctcaaaagatctaagaagcagagatcccctctctattctacccactagaaacctatctagcaatgctttaaagatacaaattgttatatgaacaaacaaccaacaaaacaatcaatttctaaacaatacaacaatgaaattgattcaagaaagatatcacctggacatcctcagtgaaatgaacgaaattaaattatcaaaccagactgagaatgaatgtcatgatctttcttgatgaattcttttgacaaatgatgcttcaacacaagcttctcatgaaatatgtgactcaacaaatgagattcttcatgattcttgaaactattatgaatgaatgtttctaatgagccttggtgcttttgaaatctccagagagtgtttgacaaggcttacttcgaaaattctaaaactcttatttcacttaatgagttacatctatttataaaaaacagaattaactgaatgtaatcgattattccgtaagggtaatcgattattttaacaaatgtaatcgattaaagttccaaaataatcgattaaagtgttcatctaaaatctggaaaaaatctcaagaacaaataatcgattaactcatgttgtaatcaattattccagaggatttggaatttttgaagcactgatgtaatcgattaacactcaaataatcgattaacacagggagtgtgaaaaatgtatcaatgcatatttaatcgattacaaccatctggtaatcgattaaactagataaaatttcttctgaaaattatgcagatggacatataatcgattaatcagtcacttaattgattatcacaaaatgacttaacaaagtcagcttaatataatcgattacaaaaatttggtaatcgattaaagtgttcatatgattatatgcaattctgtaaagatgcaattaatcaattaagtttcatcagtaatcgattaaaatagtgaaacgcactttttgtgaaaacattaatgttttaatgccatgctaaatgattcatatgatttatgtgacctaatcatgtattaatgtatgaatgtatgcatgacttaatcaacctatgtgaggaatgagagattttatctttcttgaaccaagctttgaacaaaatacatatgtcatcaaattgagtgggcatgtaaaatcaaaacttatgattatctagacttgattcttcgtgatcttcctcaaaatattcttcatcatatctaacaatctcccccttttttatttgagcatgccaaatactcaattgatgcttcttaggaagaaattgttaatcctgaaaactttctcagcatttgcaaggatcaagtgttatatcaaaacaaatagaacacatatactaatacaggcacttctaatttttactcatgctccccctgactttaagattttctcagttaattaatcaattctttccattatcaattcctatatatatactccccctatttggcatatcatattaaaaacatggacaagaattgaaacaaggaaaatgatttcattaaacataatcatcggagggtacataagagtaattgaaataaactgaaacatagcaaattaaaactgaaattaacaaccttagacaaagtaaactaaaacatagtaaaatcaaacatagaaagactcaagcatccttagactcatctctaaagattttgtcttcaatattcttcatcctgagcatgagttcatcaagagaagtattcatttcatctctttgttcatggtgaagggaaaataaagcgtccattttctgaatcattagtgattcaaatggtgagtattgtggttcagcgagtgcaagttcttcttgttgttcgtcagcttctcctaacaggtttccttcttcgttgccgtcatcttcaccttcttcctcatttacaggtttccttgatttggctattgctagcattgatatgatccataacttcatttgatacatcaacttgaaagtagtcaatgaatctagataccaaaacagcataaggaaaaggatagttcactagccttttggatttctgcatgacttcttggataatcatgatccagttgagctttatccccttcttcagtccatatacaacttgaagatcatcatccattgcttgagcgtgattggtagttcgtggagtgagaatgtaggtgatgatgtagtgaagcaagcggtcttcatgcgtcataggaccagtgcttaaccttaatcgcacattcatatgtggatcaatcaacatgcttctatacgtttccattttgttgtagccctcaacttcttcttcaaaacgacgttcaccatcaaaggtgataccagctacctcatgccatacctctggagtaatctccattgcaacaccattcacttgagagtgaattgttccatgcatggttatcttcgagcatgtgtagaagactttgaccaaatctggatagaaggttcctttcatttgaacaaacttggttaagccttgttgttcaagatggtgaggaaagttgaatccttcttgaatgaaccaagcaggattgaggtattttggtggacacagaagtttggtagcattgaattgcatgtaattcattctatcgacttcattggtaaaccaatgatctagtctattgacaatagggtttgaaggctgagcatcaactttccttttggatttcttaaccttatttgatgtggacatggtaaaggcacaaaaaggaaaggaataaaggcacaacagatcagaaatgaagcaaagagtaagaaggtttgagaagaattggttaaggtgtgaggtaccaaaagccaaggtatatcaatttataggcacaaggattagtgagcagttggaatacaaacagattatggctgttgtggacttaaacacgtccataatggctttgatggtcataattcgtgcttagtagcagttgggtgatttgaaaaagtgtcagatttttgcagtaactgcagaaataatcgattatttcgatagtgtaatcgattattttagactgaagttcaaaatctgtaatgatgtaatcgattaccatttaattgtaatcgattaagacagagtgaaggaattttttcaaaccagcaggaacagaataatcgattatcccattgatgtaattgattattccaggaagttccagaaatttgaaaagcctatcagcttcatgtaatcgattatggtataacagtaatcgattattccagacccagcaagatttttctggaatctagaatgaaaataatcgattattccgatgtagtaatcgattataacagctttgacgagtttcaaaataacacaggatgaacaaataatcgattagattcttaaggtaatcaattataacagcttttactcaaatattaaaggttttatgtagcaatcaacaattacaccaatcattgtttattaatcatgcaagtttttgaattcatttatgaagtatttagttatggaaaagttcacttaacatagacttgattcatccaatattccgagcatatttctcaatgtaaagaatctttctttatctaaaggtttagtaaagatatcagctaattgattcttactatcaacaaattcaactttaatgttacctttctgtacatgatctctgatgaagtgatgtcttatttcaatatgctttgtcctggaatgcatgattggattccttgaaatgtttatcgcagttgtattgttacataataaaggaatctgatgaagttctacaccaaagtcttgaagttattgctttaaccatagactttgagcacagcaactttcagttgatatatactcagcttctgctgttgataatgctatgcaagattgctttttgcattgccaagtaattagagagcttcctagtaaatgacaagtatcgcttgtactttttatatccaatttgcatcctgcaaaatcagagtcagaataacctattaaagtgattatcatacctttaggataccaaagtcctactttcggagtggactttaagtatttgaggattctttttacagctgtttgatgagactccttaggattagcttgatatctagcacatagacaaacacttagcataatgtccggtctacttgctgtaagatagagcaatgatccaatcatccctttatactttgactcatcaacactttttcctttttcatctgaatcaagataggtggaagttctcataggagttgttgcaattttgcaactttccatttcaaacttcttcaacatttccatacaatattttgattgacttaggaaggttccattcttcatttgtttaacttgaagaccaaggaagaatgtgagctctctcattatagacatttcaaattcactttgcatacttgctgcaaaatctttacacatggaatggttagtagaaccaaaaatgatatcatcaacatatatttgtaccatcaacatatctttgttctttcttttgatgaacagagttctatccacttctcctcttgagaatgattgatcaagcaagaatttgcttagtctctcaaaccaagatcttggagcttgtttcaatccatataatgcttttcttaatctgtacacatggttaggatattgatgatctacaaaaccaggagattgatcaacatatatttcttcatcaatgtaaccattaagaaatgcacctttcacatccatttgaaacaatttaaagttcattacacaagcatatgcaagaagtaatctaatagtttctagcctagcaactggagcataagtttcatcataatcaatgccttcctcttggttgtatccttttgcaacctatctagctttgtttcttattatgatgccactttcatccagtttgttcctaaatacccactttgtgccaataggtgtgtgagtggaagatctagctactagttcccaaacattgtttcttttaaactgatttagttcttcatgcatagcaatcaaccaatgttcatctaataaggcttgttcagtgttattaggttcaatttgtgatacaaaagtcatggtgcagcaaagatttcttaaggaagatctagttgatactccctttgatacatcaccaataatgttgtctaatgaaagatctcttgaggttctccaatccttgtgtttaagtgtagttgtttcttgagttgtatcttcttttgtttcatcctcatccagcttttcaatatctacttgctgctgtctttgcatcattaccactcaaaacttctgcttgagaagggttagtttcatcacatacaatatggactgactcttcaacacacaaagttcttttattaaagactctataagccttactttgcaaggaatatcctagaaagataacctcatcagcttttgaatcaaacttaccaagattatctttgccattattcaacacaaagcatttacaaccaaatgttctaaggtgagatatatttggtttcctccctttatagatttcataaggtgttttctttaaaataggccttatgagaatcctattgagagtataacacactgtactcacagcatctgcccaaaaatgcttaggtaaccttgtttcatttagaagggtccctgctccttcttctagtgatttgtttttcctctccacaacactattttattgtggtgttcttagagctgacaaactgtgattaattccaaatttttcacaaaacttatcaaagtgttcattttggaattcaccaccatggtcacttctaattgaaacaattttacagcccttttcattttgaataactttggcaagtttcttaaaagctgagaatgcttggcttttagatcttaagaacaatgtccatgtgtatctagaatagtcatccactataacaagtccataataatttcctcctaagctcatggttctagaaggtccaaacaagttcatgtgaagcaattcaagaggtctagaagtagaaatcatattcttactttgaaaagagtttttagtttgctttcctctttgacatgcttcacaaattttgtccttctcaaacttgagtttgggtagaccaattactaggtcttttctaattaacttgttaagatgatgcatgtttatgtgagatgttcttctatgccacaaccatgtttcattcactttactcatcaagcaatcagttttatgtatgaatgcatggtcaatagtcaagacatagatattaccctttctcttaccaatatgtgtcacttttccacttttgctgtcatgtattaagcaagtttcattgttgaaagtgaccttaaatcctttgtcacacaattgactaatgctcagcaaattgtgtttcatcccttcaacatacagcacatccttaatctttgtagacaagctgtctccaatatttcctagcccaattattttgcccttattgttgtctccataagtaacatatcctttgtcttcaagtataacatctgttagcatggatatgtctcccgtcatgtgtcttgagcattcactatcaaggtaccaagttgaagattttcctctaagacaaatctgtacaaatcattttagaaggagagatagggtccccaatttaagttgggtccaaaggggttagttggtttctttcttttctcaatccatatacattcaccattaggaacataaaatcttctagcataacacttatatgatgtgtgacctttaagcatacaataattgcaagtaagattctttgatgatttagcatgtgtgaatctttgatagagatttgattgattatgctgcctttgattcttatgttttggtggtacaaacacaagcctgttttgtgttctagcttcatgtttatatcccaatccataagtatcaccaacaaacttttgcacacttagtaactcatctaagttgcatttacctttgtaatactttctcagcaaatcaatcaagtaactattttcagtttgtaaactcatgttttcttttttgcacatagcttatactcatcaaattctttttgcatattattgagatcatcaaccttagagttggctgaggaacatgtacatccaacttctttgtaacttgggagaagcttttcatgatcttccttcaacttacaaagctcatcttgcaattcagcaagtttggatacatgccaccttatatcactcttaagtttgttgtttgctttagctaatctttgagcttctaaatgcatctcatgaaatgcatcaacaacattatcaaattcagaatttacctctaattttgtactagatgattcacaatctccattgatggtggatgtaagacaaagatggacttcaatctctttttcagatgcggatttagaacttgttgattcattatcctcccaagcaatataaacctttttctgcttcccttctcttcttgacttcttttctacttgtggcttcttagttaatgagggacaatctgattttatatggccttgcttctaacattcaaagcaagttattgaggaggggttgttgttcttgttcttgtagtcattctttttcctttggaatggttgttttctgcccttgttcttccttagaaatttggagaactttctaacaatgaggttgacattttcatcatcttcctcttcacttgaactatcattttcttctatctttgaaggtgcagcctttaatgttatgcttttgtgctttttatttgcatcttcattatttgttagttgagataattcaagctaatattctaaaagcttaccaaacattgatgccattgacatttgagatagatccttagattctttaatggctgtgactttaggttgtcaatcccttgttagacacttgagaattttgatgttcaatttttcagcatcaaaggtttagcaagtccaagcaagtgattcacaatgtgggtgaatctagtttgaagttgtgagatgttctcatcatctctcatcttgaacatttcatattcatggatgagagtgtgctttcttgatctcctcacatcttcagttccttcatgtgtaacttcaagcaattcccacatttctttggcacttttgcacctaacagtcctgaaaaattcatcgaaagataaagcagaagttatcatattttttgccttgaaatcaaattgaaccattcttttttcaatttctgacatttcatcccattcttttggtattgttttgttatccacaatcttggttggaatgtaaggacctttttcaatacagtttcaagctcccgggccgtttgattggataaagatttgcatcctactcttccaaaagttaatatgttccccttcaaataaaggaggtctattcaatgagactccctctttgaaagttatttgattagtattcattgtattgaattttgaaaagatcttgagcaaattacaagaaccagctcttgatgccaattgaaaatagaatgaacacttatgcaaataaccaagagggggggtgaattggttttacctcagagtttttaaaatttaaaacaaattttatacacagcggaagactttgaaagaagaatcatatcttaaccaattaagaaatcaaacttttaaaatcaacttttatctcaatcaacccactcttgagcttcacccaatcttgtgatgtaaacaaatataatacttcaagaacaatatgaatatgaacagaaaattacaaatgcacacaagatttatactggttcacctctcaaccctggaggctacatccagttttacttctaatcaaccttgattagagttttcactataacaaaatgaatatctttacaagcaaacacagatctcttttacccaccctaggtaaaattcaaaatctaaacttatagacttctcaaaagatctaagaagcagagatcccctctctgttctacccactagaaacctatctagcaatgctttaaagatacaaattgttatatggacaaacaaccaacaaaacaatcaatttctaaacaatacaacaatgaaattgattcaagaaagatatcacctggacatcctcagtgaaatgaacgaaattaaatgatcaaaccagactgagaatgaatgtcatgatctttcttgatgaattcttttgacaaatgatgcttcaacacaagcttctcatgaaatatgtaactcaacaaatgagattcttcatgattcttgaaactattatgaatgaatgtttctaatgagccttgatgcttttgaaatctccagagagtgtttgacaaggcttacttcgaaaattctaaaactctcatttcacttaatgagttacatctatttataaaaaaatagaattaactaaatgtaatcgattatttcgtaagggtaatcgattattttaacaaatgtaatcgattaaagttccaaaataatcgattaaagtattcatctaaaatctggaaaaaatctcaagaacaaataatcgattaactcatgttgtaattgattattccagaggatttggattttttgaagcactgatgtaatcgattaacactcaaataatcgattaacacagggagtgtgaaaaacgtatcaatgcatatttaatcgattacaaccatctgataatcaattaaaccagataaaatttcttctgaaaattatgcagatggacatataatcaattaattcgccacgtaatcgattatcacagaacgacttaacaaagtcagcttaatataatcgattacaaaaatttggtaatcgattaaagtgttcatatgattatatgcagttttgtaaacatgcaattaatcgattaagtttcatcagtaatcgattaaaacagtgaaaagcactttttgtgaaaacattaatgttttaatgtcatgctaaatgattcatatgatttatatgacctaatcatgtattaatgtatgaatgtatgcatgacttaatcaacctatgtgaggaatgagggattttatctttcttgaaccaagctttgaacaaaatacatatgtcatcaaattgagtgggcatataaaatcaaaacttatgattatctagacttgattcttcataatcttcctcaacatattcttcatcatatctaacataaatgtcttttgcataccctcacctgtcacgactgcttatagagcttggatttgaagatttcaaactacgcttatttcccgctcaaggggtatgattttttggtgatgatctcctaacaatcagagttgagttcaaccttaatcacatttcgaactaagagtgctagcaatacacttttcacaaattcttttaacccacactctattattgattaaaacttattacaaactacaaaattaagagagattcgttaaaaaagaattgagccccaaaaaaatcatgatttcaatcaatttcagctaataatagtcaatgtgttcaaaagtgtgttaaaaagtgtattgttaatattagtgtcaacccaacatatttttaagccttaaaaaagtgagttcaattttgagacttgatatattaagagacaatctattcaagtaaaataaaatgactaattgattttaattctttagttgaagtaatgactaattgattttaaatttggtaagaattgatatattaagaaacaatctattaaataaaattatgactaattgatttttaaatgagagagggtaacaaaaaaataagtaggggccttacaaaaataaaaaaaatatcagtagtaaacaatttttttagaaaaggactggttaacatttctctttaaaccaaacattcatgtggtcaagggcttctcaaattctaatcctaacaatatccttaaaatgacattatttgaacgtcgtaaattgcccttgcaccacccagataactttggattggggcccagatcatttgatgtaacaaaattcagcccatcgtcctatactcgtaactagagtagtccaatgaacaaactttatcattagaagaaggtttaattaagattttaatcccttaaattaaagggtctgttttttttagttttacaaataaaaatttgtattttttagtactttaagtttgaaaaatattctttttagttcctttaccaaaatttaagggacaaaatatataaattttaatttaaaagactaaacataacactttttgaatttaaataactaaaagatataaaattttatttggaaaacttaaaaatatatacttcttaatttaattaacccatataataatacacagtgtttacttcaaattatgaacttattatctataaagagaatgtatattgaaaacttagtggacaatgtattcacctagtgttttctcaaacttgaagaggtttttgggaacaatcataaatgatatgcttttattttcaggacaatctatgataaacaggataactgaaatggagcatattcaatatctaatgatgtttgacttgaactttatgtccaccagacaccagagatggggcaagataggaacattaataatgaagaaaagtttaagcacaacactcattcctctagcaccaaaaatcctataatgcacacccatttgggaaacttcttagcttggttcaatttagttgagaaatcaggcaacaaaacagaacaccaccttttttagttaaaattaaaatagccaataccctcaaccaaatcacagtcaattaaatttaaaacagaacaatcctttgctcgcaacaagataattatttcccaacaaaatcatgctaacttattgtgaatcctacctctaaaatggttctactttttagcagaagctttgaagaaagcaaacaattcatctctaggaggcagaccctccttgatcacagggtggttgataaagtcttgactccaattatataacttgggaaatttctcaatggtgagcaactccaaccctgcaatctcttgcaatatggcaacccaatacccaatgaaattggcagcaatatctaccaatcctatgctctctcctccaaagaatttcttgtctttcagtgtttcccgtaggattttcaatgcttccaaggcttcctccactgctttctcacgcccattctcgtcactccagcaagcattccatatagctggcaagatctaaaaccaaaaaagacaacttaattaaaaaccctacccgatagtagtgcttgactgcttgctttagccatacttttctttttcacttctctttaaaacaaaatgtcctctatgaactttgttttacagatatttgttgctaaaaagagatacttttagttcttcaaatttactaaacatacatgcattttggtgtttttaatgttatcatctaatcaaatttaaagttttatctttttttttatccataagaatataatatacaaggaagtttacaatatctcatatggtctactcaatcaactaaactagacagactccttggtatttaaagttttatctaataacctatattaatctttaacataaatctttattgtttaaattgtcggtgaatatctatttttgatttaaaatacaatacaaaaaacacttccaaaatctgtacttgaattttctctttttgaaagttgtatatttcatatccaacacaaagactgcttaaatcaattcaactaacaatcaattttaaactaaccccaattcttcgatgagaaactaaatataaaaatatttacctaaaatctactaatccaaacattctgtcaaaaaaaacactaatccaaatttgcaataatcaaaatagtggtagaaaagaacaaaaagcaagattaattgctaaccttgtcatctaaggtcttagaccagaaacgagccaaggctctttcataagggtcttgaggcaatagtgggttatttttccacgtctcatctatgtattcaacaatgatgagtgactcgggcaatgggttcccatagtagaccaaaaccggaaccttcttgtgaacgggattgtacttgagaagatcagcgctcttgttagcaagatcttcctcggagtatttgtagggaacacccttgagcttgagagcaaggtctactctgttgctaaatgggctggcccacttgcccaatagcctcacttcttcatgatatgaagccattggaagtggtgttggttagtgctcaaaactgaattgtgttgcaaaataaggttaatttgttagggtgtggtttgtgagtttggcctttacagagagcttacaaggattagtagagaagagaagctggaatttggagtttgttttgttttgctcttagttgtgggatggtcttggtcaacttcggggtactggtgtttgatggaggtggtaggtggcttcctcgaatctcataaagttcaataatatattattaaggttttgatatttttgcagcaaaagaataaaaaataaaaataatagttaataaaaaaatattttaaacagtaaataaaatattatttaaaatactttaaaaatgaaaaacaaaataataacgactttaaaacaaaaaaacaattttttatagaaacaaaaatataaaaaacattaaattataaaaaccaaaaatatatttaaatctaaaaaatcatattaaagaatataatattagtattttaaatatatatctcaaaaaatagtattataaatatatttttacctttattttaataactcttttcatttattaatttaacattactttttaaaataataaaataaattggcattatttattaaatcttcatttcttgaaatagttgatgatatgaaagaattttgtgctacgataacaaaaggattttaattaatataaaaaaatctaatttgaattatactatttttataaatactttatataatgtcttttgtacttgtttttttaattgcgatattatttatcttatttcatactttatcttttattaaaaaaattggacaaaagtattgtataattattttaatctcataacttaaaatactctggaattctagcgaggagctaaagacaataattatgactgttacatgttttttttttatagttttacttgcttaatcatactgatccagtagtttttagattgctcggtttgtatatcattttatctttttcgtctttatgtgaagtttagaagattttttatcttaattatcaatttgaatcctaaattattcaaaatgtgttaatttagtctttaaatttttaaatgctcaaattttgtcttctaattttaaactctctcaattaagtttcttttgtcaaattgagattcatattgttaacatagcaattgagtagaggatgttacgggtacatcaactcaagttgtcaacctcaattagacaaaaaggatcaaattgaggcttttttaaaattagagatcaaatttgagtgtttaaaattttgtggatgaggttgacacattttaaatatttgaaaaatcaaattagtaattaagtttttttattcataagaatcgaagacaaatatcaagtaatcatgtattttattcaattaattgagccaaactcatcactagagtttagtgaattaagtaaagtttaactacatataatagtttggtatatttaaatttatcacataaatagtatatctaaggttactcgtcttgttttttttatctaggtttaaatacattttaatttttgcaatttaatattttgatccttgtaatgtatttgttttattttttgtccttaaaatattttagataataatgtgaacaataagaaaagtattttgaatagctttaaggatgaaaaacaaaataaacacatttttcaagcactaaaatgaagaaaatacaaagacaagaatgaaaaaaaatactaaattataagaactaaaaatatatttaagcattttatctatttaggttaacttataatttcttttaatttaaatagtgggccaaagccctcaacatagaaaaaagagagttgttattctcaccctgcattttgctattctcaccatccacatgggtgggtttttacatatttgattttcaatgcattcatcaaatcaaatccctaatagtgacaataacctgggacaacatatcatattttacaaacaatcctttccaatggattttccaatgcattcaaaattgtttgtcctcttgtattgtaaataaggtaacaaaaaaattcatgtctatgaaaattacatcaacaatctccaacaacaaaagattatatttgtttgtcttgtaagtagtatcacatattatcaatgttgggaatgaattcaaaaactcgatggaatcatgatgtgaccataatatatctctaacaacatcttgaatttccagtcttctaaactagtaaacatattcattgtgttttataaacttcgtgagatgttgtatttcagttcttggacccttttgttcgtgacgatatttttgtcattcattgtatatgttttgatgacaatgacatttcttttatcttgatttttgattgtaaacaaaatttgatcaaacttcaccatatttttggtcatttggctaagcaaagttttttcttcactacttaaataaaaaacatatgcatgacccaacaatgtttcactaacttcatggttatgaaaaccaaaaaactatgtaaagttttcaacctatttcttttacaagcctcccttttaatttaaatggacacccacattttttgcttttagtggtcttgcagactaacttatctttgtattgtttgtactttcatccttgtcacaagccaacaggacaaaggtcttcctccaagtttttaacctttcagtgacaataacaaatccaagctcctttcgcgcatctcaaactcatttcaacaaatcatgtcgctcttgaaatacctaaaaaacaaatattctttccttcagtgacaaaacacaaacaaaacaaaaatacacaaaaataaaatcaatcatcaattaatcaatatacttcatcagtcaataaattattggaaaattcaggataattaggttgtggctcaatgtccaaaccactatcattttcctcatttgcgtctcccaacccattatcatctatctgctttccatatgcttgattgggacgataaaaaaaaaaaaaaaaaaaaaaaacatattggcttgcatcaatcatgtttcccccaactacttggcattgtaactccaccaaaaataaaagtacttcaatccattatgtatataaatatttttttggttaattcatattatgttaattaaaaataggaaacaactgtcaatagaaaatacacaatcgagtcgtgattctgttgtgtgtcaaaatctagacaccaacaaaatcatgatttttttgttgtctacaaaaaaacataatcatgatttcattgacgtaaaaaaataaaaaaaatcataccagtcacagatccaagctttagacgaatcaaaggaagaaaaaagggttgataggagatagatttagggtttggattgtgatgaaaaaagaagggagaaaaggaggtgggcgtgtcattagagaggatggtgagggaataagggaaaaggttaagggtatagaaatgagaagaggataacaaggttgatttacatttcatgggggtgagaatagcaccccctagaaaagacaataccataaacatccccttggactccaaggcttgaggagaaatatgaactgtggggaacataaataggacaataaagatcacttcataactcaaattcaatgtaatatgtgccaggtgtttggttagcttgaatgctttaatgggctagttatatgggcctatgcttattggttcctttggacctaaagaaaccaataagtctataatgcaagtttgtataatataagccttctaggccttggattaggccattgctattggcactacccacatggtgggtttttcaaattattctaaaattgtccttcccattgaaacatgattttgttgcacacttgtacaatgaatcatgtttatgtcgcacacacaggtgaaaaaataaaaataaaaataaaaaatatgattacgttgtacactataaaaagaaatcttatttccgttaaacacatgtgggttaaaacaataaaagtaacaaaaatacgattctattgtataatgtacaaagaaattgtatttccattagtttaatgtttttcacccccatgagtgcaacagaaatacgattctgttatacactatataacaatagaatcatatttccattgttgcctcaacatcccaaacaagaactcaacaaatatcaacattgtaggacccatattgaacaacgataacacaaatcaacatattcaacaattgacatggatgactgacaagacacagatctcaacatacatcataacgtgcatggctggcatggtcgttgtcgtcacacacgcgggtgctaactgtggttatcgtcaaagtgggtggcatggccatcatcattatgtgcaggtgctggtcattatcgttgttgcaatgggtgccatggtcgttgtcatcgcacgccacgttgcttcctctgcgtcaagatttgaagatggagagccttcctccacggcagacgcaagtgtttcttcataaaagtaacgatttggggtggggtgggtgggcgcaggggagagggggttgggtgagtgggtggcgcggcgcaatgcaaatgggagggagaagtctaaggggaagagtggagtggcgcgagagaaagtctgagtgaaaggaaatggagtgtagggatttgggaaaaaaaaagggatttcgtaggggttggtagtgccaatagcactatgggtagaaggaataatagttccctttgaattactataatccaatgaaaacttttacaactcaagtctttgtttcttggtaacctccttactccttatggtttaaattgaatgtgaatggcgcttgtaaaggtgtcatggaacttgttgtatgtgattgtctgattaggggaagtgatgattaatagatcaaataattttcaaaattcttagaatccacttttgactttgttgccaaactatagggtgttcttcgaggattaagattagttgctagtttgggcatgcaaaaattgaaattaatttgaatattattggagatgttaactgtattaagtgtacataatagcttgatctctttaggtaggccttgatttctataataaagccaaatatattccatatgaattaatgggggattcaatttgcaacttccattttttcttgcatctcttgcatatttcattttatttttgttaattttatgaaattactttttggaatgtatttttaaaatgtagtgactaacattgttaattacagtatgaaaaaccaatttttgtaatgtacttatttcaattcatttccacatttagttttttttttctttcttaaattacttaataatttataagtttcacaacttaataaagaaaatatctattttttttgtcacaatgacattagtgtagattataattaatttactaatgattaatttttactagataacctgactagtcatctttaggggtctccccttccaatcacgtttttttttttttcatctacaagacttgaacctaaaactttgcttaagggatctagggcctttcccactcaaatcggaacatcatgattttcttaaatgcacaattaatttgttttaattgaaattgaaagaaattgaattcatttatttaatttcattgaaagtataaatactttatgttgtttgtgtgagttttgggttaacattgtgtttggctttagggagagttggggagaaggagtgtataacgactcgtcactactacatgataacttaaaactaacaaagcggaaaactttatttttaatttatttcaaaatcttgaattaattttttcatgaaaatacttttgaattttttgaattttcaaaagccaaagataaaacaatgtatataaaacaatcaactaaataaaatcatgtgcctcatggcacatcaacatttatcctaagataaaatatcaaaacaactcaacgcacgtctatatatgcatacaactttttaagtagatagtcttaaataccaacattgatcaacactatacaaaaaactaaaaggaaacacaagaaacattgcatcttcacattcaagcatgctaatccacaagcctccaaagaaaaaggttctcctcctaaccatctactcccatgaacatgaagttcaaaatcatcatagtcaaacccacatgtgacacacacaagggtaaggttaccaaaaacacacatgctttaaacaaatttaaaacttagcaattaaccaatacataagctttatcatcttcaaatcatggtatttgaatgtaaataaatcaataacattcaactcacataagcaggcaatctcatgtacaattatcaattataaacatcatagtcaaccatctcaagcacagatttaaaagactcacaaagtggataaacacttatcacgaatacagtcaaacaactttgctaaggaaataataacaatttaagcatagattatgtcatccaataaattgacagaattttagcactttaataatcacttgcttgattttctcttcattctcctgtgttgaattgtaatgctttaagttgccttttataaaattcagtaatgagatccgttatgattttagagtcttccttgaaatggtcgttgtctctcagtaaataatgcaacgtatcaattccttgaatggagaaagagaggggaaggacaagaacgtgtgtttttcctccacaacttgtatgatttcggctcaaaggagtattctcttttattttgtccttggatacttgaaattcaagtattaacaattcaaataagagacaaaatgaatttacaagcatatgtttcacacttatgctatgcttctagatatatcatgtcttaataaagaacattcaaaacaatcattagtagctaagttcactcacttcaattttgtttgataattgtttgtcattattaaaacattagctttttgagagactttgtctgaatagagttgccaccaatatttttaataaggtaaacattggagaacccattcaaaagataaatgatcttcacaaataaaatatgtattcgggagtcaattatgtgtatggaacgtgtaactactctatgatgtccatcctaagacaattacctctaattaactaaaaattattaataatttttaaaatatttatctcaccctaaaaaaattaagacttaattataaaaaaaattaaaattcaatttatttacattttatttcatttttcataagattttatattctattttatatggcttgataggggtgttcccctactcctatgtatctccaagtgcaatggagaattagggtctacatgaccaagtgacccacttcagtttagtttcctttatgattgaaacatttttttaaaaaaattaataattataaaatgaaatatatttttattattaatatttatttttaaaattatctatatgtccaagttatatacaagtgaaaatataattgcaaagataatggatttataaacaaacatttgtataaataagatattgaataacattaaaatacaaagaatgaaaaattaatatattttaacaaacataaataattataataatgttattaaatttttaaaatatttgcatttatttctaataatatatttatatttaaaatttaaaataattgagaaattcatacattacaatataagttataaatttagctcatgtattgcatatattaatacactactatatcatagaaaaatgtttatattagagtgtattaatatataagtgctattttggttgtgcatgcggtgaaaactgaattggtccgaattggatccgactacttggtcaatctgatttagtcattagatcagttaagtatatgacctgaattcaattgattgtcatgacaattggtgacatgttcgattttgaataatctaaatctggttaagcacatcaatttttttttatagaaaaaataaaaacgcccaaaatgctcccaacacgagtagaatgatgcgcttttctaatttataatcaatctcactcttacatgcatgagctgggttgggttctcttcaccatttcactttcaccctaaatctcacccctctttcttcatgacacattccaccatgattttcactagcatgagggggcctgaggagcatcgcaacgtgttgtttgttttgcacacagtttatttgtatgtggttctttgcagatgaagatctccaaatctccaatatttcgttttagagtttcttccttctggtttgatttggtaataatttaattatgattttttttccatattagtgtttttgaaagttgggattgaagtgtttgaactatgaagaatcaatgttgttctggagatatgtgtatttattgattgcaatagattttatttgttcttatattatcatagaaaaaatttatgttaatggtttcgcattggatatttggatgtttagtggttgcaaaagcttttgtttataatatgaattatatatttctttgtaagtttgtatatctttgccaatgaatgttgaggtaaattttaggattttgaaaatgtcaaaatcctttttatgctacacatttcattgtctttcatttttaccctgtttctaaaaactaaaatgaaactttaagcaaatctgtaacaccccgtaggcttctgaagtgttatcattaataatatcagataagcgcttaaaacatgatttaaaaacctcaacggaagcactgaatcgcttttcttgattcattatgtatggaatacaacatataacacacaacatacatacaagacacatatttcacacccctgctgatccagtttctcataacataaaccaaaaagatagataactaaaagacttaggcagatgatcaaatatgcaacatctatactcaggagaaaagtctcatatacatatcataaatagttatgtacaacatatacatcacagttcacaccacatcatggtgatacaaaagaatatctgccctcacagagggtatacagaactatacaagtatcaggtgtacacacaccatcccttatcaagggtacaaaaaatcatcaaaacaaatctgagccttcaagctccatctactgcttctcagtcaagcagcccatgtctctactgggacctcctgccctgatactgctctcttcctccagaagagtcacctgtaatcaaaattccccatcctgagggattgagagctcccgatgtggatagtctctctcaggcagttaatgagtagtcctgggggattgagagctccctgtgtggatagtctctcacaggcagaggattggaagtcctgagggattgagtgcctccgttgtgagatgatctctctcaggcagtggactggaaagtcctgagggatggagtgcccccggtgtgggatgatctctttcaggcatgtgtggtgaaagtcctggagatgattgccctatatggatgttcttgcccaggcatgtgctatgaaagtcctggagagaccaggcaattgacagatatgttgtatctctaagagagggcttcccgaggggatgagagcttaaggcctcttagatgagccatatatggattccttaagtcctgagtagatgactcaggcaatgcttgttcagtggatgaggcggtgcctctctggtatgagaagtgtccaatggttgacgcttatgttaagtacctctgtgagacgagtctgagatggcttgagagccagtatgaggtgggatacctctgatgctgatagcatccagttagtacccagagagctagggaatgtgtgatagtcaggatgatgtcctaggctttgttgtgatttgtttatgtgtttgtgcttgggggtgaactagggtaagggaagatctcctagaaccctgagcttactgagaggtatatctcacccctgttgtgggttatggttttcaggtgcttctagaagagaggagcaaccacaggacaggaggccttagctgagtgtgctggagtggtcatgggctgcagaggaagtttagaagtttcttttgtttgatctctgtcttgtaccttgtatagggatagggtgttggcaaaagaaccaaaagggtgtttttttaaaaaatatttaccgataaggtgcgttttcaaaactatttccaaatctggtgcaaggggggtctatatttacaaatctggtgcactgcaacatgcctgaatcaggcatgttacaacacgcctagattgggcgtgttgtaacatgcctgattcaggcatgttgcagcagccccaatttggtaaataaggcccccccgctccgtagtcccttcatatcttggcttccagtattctctgtctctactaaactgccatcattctggtattttttcgttttttaagagatttttgaaggtgttttgagtgacgagaagcatgcgttcgagtggtgattctgttcacgtttgagggattagggtttgctgggcatggttaggttgtgtttagggtacggtcatgtgacgatagtttgtggttaagggattagggtttgctgggcatggttaggttgtgtttagggtacagtcatgtgacgatagtttgtggttaagggattaggatttgctggacatggttaggttgtgtttagggtacggtcatgtgacgatagtttgtggttaagggtttagggtttgctgggcatgggacgtgacatttgggccagggttggggtagggtaaggtttcatggtcatgtgacgatggtttgcagttaatggtttaggttttggtgggcatggtatgtgacgtttgggctagggttggggtagggttaggtttcatggtcatgtgacgatggtttgcggttgatggtttagggtttggtgggcatggtatgtgacatttgggctaaggttggggtagggttggtttcatgattttggtttcaacttggcaaactgcttcaccttcttcatcagctcatgctgatagtcctcagagtaaccctttaatcctcgcaaactattttctcaaatagaaaagattccactattccctctaatgcggaatgaactcacgatatggcaaggactactatgcctgccccatcaatgtaaccaagatcaatagtaaatcattaaccattaacctgaaccccccaaaccctaaaagcatgaacctcgacgtacattgtttctacttgtgccaagtccatcatcatatatacagataagaggaattaggtcaacttgactaacctggggagttgaataaagtcacgggttaaaatgagtttttcattagttgtttccacttatggcaagtccatcatcatatacacagcaccaatcacactcttcactcttcatcagcaaaacacaacaagaaagaaaacgtctgatcatgtctttctcccattcaccttcttcatcaactcatgctcatagtcctcagagtaaccctttaatccccacaaactgctctcaacaacttggcaaaatgaatgcaacaaagattccactagaaaagattccattattccctccaacaggaacatacagtgcccttgtggccatgactcttgcgaaatcaactcacgctatggcaaggactactatgccatccccatcaacctaaccaacatctacagttaatcattaaccataaaccctaacaccctgtacccatgcctactaaaaccataaaccctaaatcctaccccctgcataccccctacatacacctaacccataaacccccacaccctaaaagcaagaacctcgacgtacattatttccagtagtgccaagtccatcatcatatacacagagaagaagcaaaacacaacaagaaagaaaacgtctgatcatgtctttctctcattcactgtcttcatcagctcatgctcatagtcctcggagtaacccttcaatccccgcaaactgctctcaacaacttggcaaacaaatgcagcaactgtatgtttactgtactacaactacgaaggcactattactggttacagggagatgtagcatgtgataaaagaaggaaagtacacaagcagagtgtgtctttacagatgcaatttttgatgtgcctagacaatagacatgtatttattatatatactaaatagggattggttggggtttagggattggttggggtttagggtttggctggggattagggtttggctagggattagggtttggctagggtcttgggtttagggtttatggtttggttggggtttagggtttggctagggtcttgggtttaaggtttatggtttggctggggtttagggtttgggtttagggttctgctattttttgtctttacacgcttggcgatttgcttttgctggtcagtggttcccataagctttctaacacaccatgtatctcagcttccttccatcattcaaaatctcaaagtttcttctttttgatcagtgattcactggtcactagatctagggattccgcctacactcacgaaagaaaaagccactgcaaaggataaactatactcaaggtgagagaaccctcattacggggttcacgtcgttaaataatagttggaccgagtgaaacgactacttctattttcctttaattcgtatttattttatgaaatttcgagttttttttttcaaaaaaaacaagaataataaaggttcaaataattcctttgttaattttgaaaacgataaagaatcataaaaatatttgaaaatgatttttcaataaaaacgttaacgcgttatctaaataacatagtttaaattattcatacatacttgccatacaccatcattaccagttttgatgcttaaacagttcagatagtccatacagtccatatagtccatacagtccataatacagaacatagtagaaaacatgcaagcagagaattatcacaacagtcttcaccacatcttcttgtacaacttccatttcactgttcctctgctcgcccaaataattggggtcatcacaggtgtcaaccacaagacacaaaatagggtaagtcatgataaacaaaatttaaatacaaccacacattagatacagaaaattagacttatgtactaattaaataaaatacagaatacgtaccaactaattagaatacagaatacgtactaaataaataaaatacagaatacatactaaataaaatacagaacacgtattaaataaataaaatacaaaatacgtactataattgttatattattattttttttcaccccttaaatagtttcttttccactcacaacacatagaaaaatgcatgttcatctttattatatgatgcatgactgagatctcagcaacgtctaataattgtggccaccgtcagataaccccaccctcaccttagtggaacgaacttatccatccggtcagggtagctcagtggcgcgtaggattatcactcccatccatgtgatcttcatggtggtgtggtcctcactgcgtctaccccctagttatatggactcagtttagttatctgacactcctcttcacgagatctaacaatctcatcatcatcatcatctcatacccccaatgggtatatgcacatgaaatgcacaactggttccttttatctctctattattttattttcatcatctcttaacattacagagtcatcttcacagggccttcatcccagactcatcacaacatcacaagggtacaattttaccatcatatcatcacagagaatgatttttaacctcaaatgtatactatcaaccctcaaatcgagttatatcaaatatcataccataatatcaatgtcaacaacaatagaatagatcaaaataaatcaagtatcatcaagataatttctcaaaagataatagtaaaggaaatagttaaaacttaagtgaggttcatttcaaaataaatcatcttatgaaacataaaccatatgttatctatgatttattaaacatgatatctatacacaataattagttaaaggaatatctaagataaataattttagaagcatataacgcatgactaatccaacatataacaacaaactatctatttaaggaaattcatagaattaatgaaatgttactaaataaaattagtatcaacttgccaaaataagtttcaacccataaatctaaatcatttagcctcaattagggagttagattaaattatttatcctctactgtccatcttaattttgctatttctcttccactaattctttaataatttaagtgatagtcctaagcatgatttaatatctaaacttcatttatcaaacctccctataccttaagtatgtttcaaaaatttggacagctgctcctttgatcaagcttcacgtgccttgctcttttccttgaagaaagtgagtgaaaatgatagcttaatgtgatggaagtgtgtacggtggaatattttagagtgggaattcaattaaagcttgaaagcaaagttcaaatgtggtgggctaatgcttgcacggttaattcctttaggctcccaaaaaattctgctgcacctttccttatatagctaacttgtttttctattggtggaactcaaatcccttggccccccatccacaaaatctgcacggttacaagaagataaggccaagtagatttttcttcttcctttgatagaatatgcctttgtatttaatgctttgattcctttggtccccttagctttccacatgcttgtttttaattggttattccttttatcatttgatttggcccccactcttcaattctgattgtatttcacgtgtagtattctaatgcaaaggctattggatttttttcttcttcctatttgaccgtagcaagccttttattcaactcattttgtgcttttcttgttttcttctcttcaccgtgcctttcttcacctaatatttctttttgttttgtaatcaattagtttggttcttgtgtgcacatagacttattaataattccatctttcccctccattattgatcatatggttagtttttcttcaaccaccaatactccacttattttctgttaactagcaaaatcatacttgttggtttaatttttaacattactaatttatcttgataaataagtctagttaacttataattttaataaaactcctaatattatgttcatcacttttataaaattttctaatacttagaatagctttaaattaaattttatttaaaaaaatgtgtatcaagtgctaaaaaaatccctctagataatgaattatagttttctctccgtcccaaagtgttttcttaaatccttattaaataaaatattggggtgttacaattctccccctcttaaaaaatttcgtcctcgaaatttacctgatatgaagagtgccggataattcttttgcatctcgctttctacttcccatgtggcatcaccattaatattgtttccccaaattaccttaaccagcggaatttcttttcctctcaagactttgatccttctatcctcaatccttaccggaaaggtttcataagtcaaattgtcctttataggtatttcatctatctcaatgacatgcgaaggatcatggatatatttatgaagttgagacacatggaacacattatgaagattggaaagatttgggggtaaagcaatctgataagctactggcccgactcttttgataatttgaaaaggtccaatgaaacgcggtgtaagctttcgggatttcagagctctccccaccccagtccaaggatttacttttagaaacacatgatctccttcctcaaactctaaatcttttcttctctgatcatgataatttttctgcctgctttgtgcagttttcatcttttcctgaatcaacttaattttatcagtggtttgttgtataatctctggtcctaaaattaagttttctccaggttctacccaacacaaaggagttctacacttcctaccgtacaacacctcatatggtgccattccaattgaggaatgaaaactattgttataagtaaattctatcagaggcaaaaagtcttcccacttacctttgtgttctaaaacacaagctctcaaaagatcttctaaagactgaattgttctttcagattgtccatcagtctggggatgatatgctgaacttaactttaatttagtccctaaagcttgttgcaaacttccccaaaatcttgaagtgaatctaggatctctatcagatataatactagaaggtactccatgtaatctcacaatttcctttatatacagacttgtcaatttctctaaagaatacctaatattaatagggataaaatgagcagattttgttaacctatctacaatcacccaaatagaatcaaatccttttgaactcttaggtaaagatgtaacaaaatccatagctatactgtcccatttccactgaggaatttctaaaggttgtaacatcccagatggcttttgatgttctattttggctttctgacaaactaaacatgaatgtacatattcactgatttctctcttcatctttggccaccagaacaacgcttttaaatcctgatacattttagtggctccaggatgaatactcaacttacttttatgtccttcttctaaaattaatctcttaagttcaagatcattgggcacacacactcttccttgtaaccataacacatcatcctttcctatattgaattcactttttcctcctttctctatattctcaaatatatttctcaagaaagagtcagatctttgcttatgtcctatttccttcaaaaaagcatttgatacttgcaaagctcctaatttaatacttacaggtgtagtctcacacatcaaacttaaatccctaaattgttctaccaaatttagctctttaatcagcaaggtggatatcattaaagattttctgcttaaggcatctgccaccacgttggcttttccaggatgataattaagttcaaaatcataatccttcaaaaattccatccacctcctttgtctcatgttcaactctttttgactgaataaatatttcaaactcttatgatcactaaaaacctcaaaatgtgaaccatacaaataatgtctccaaactttcaatgcaaatactacggctgccaattccaaatcatgggtaggataatttctttcataagttttcaattgcctagatacataggccactactctcccctcttgcattaaaactcctcctaaacccattttagatgcatcacaatatactacaaaaggtttccttaaatctggtaacactaacacaggtgttgtagtcaacttattcttaagagtttgaaaactttcctcacactggtcattccacacaaatgcttgacccttcctagtcagaatagtcattggcaatgctatttttgaaaaatcttgaataaagcttctgtaatatcctgccaaccctaagaaacttttaatttcagtgaccgtcttaggtctttcccattccatcacagcttgtacctttgaaggatctactgaaattcctccttgagctatttcatgacctaagaaattcaccttttctaaccaaaaatcacactttgacattttagcatacagttgccgatcctttaaagtttgcaaaacaactctcaaatgctcggcatgttcttccttagtcctagaatatactaaaatatcatcaatgaatacaaccacaaacttattaagatagggatggaaaactctattcatataatccataaatacagctggggcattggtcactccaaaaggcatgactaaatactcatagtgaccatatcgggtactaaaagcagttttaggaatatcctcagtttttacccgaatctgatgatatcctgatctaagatcaattttactaaaaacacaagctcctactaattgatccataagatcatcaatcctaggtaaaggatatttattcttaattgtcaccttatttaattgcctataatctatacacatcctcatggaaccatcctttttcttgactaataacacaggagcaccccatggtgacacactaggtctcacaaattgcttatttaacaactcttctatttgcttctttacttcaactaattctacaggagacatcctatatggtgctatagatatgggtccagttccagggactaaatctatagaaaactcaacttccctttcaggaggtaatcgatctacttcttgaaatacctcaggaaattctttcaccactggcatactctctttatcaatctcaggttcagattcagagtgagatttaatcatgtatatttgaacatcattctttttcatcatcctaaggactttattaggggagataatctgcatatccttactaacttgaggattcccaaaaactatagttttatcaaaacagttcaacaaagcatgatgagaggataaccagtccattcctagtataacatcgatttgatgtagtggcaaacaaatcaaatcaacagaaaacacatgaccctccaactctattgaacaatttagacatatttcagaagtaacaactgactcactcgtaggggtagtaaccttcaaaaagaaactcaaaggagacacaggaagatgtaaattttgaacacaagtataagaaataaatgaatgagtagctcctgagtcaaacaatacgtctaaaggaatttttcttatgaaacacttacctcggatcaggtcttgagattgagaagtctcacttccgctaagagcaaagactcttccggtggttttaggtctctcggggagttgaccttgatttccgttctccttctttctgagattcagaggattcagaggacaatttatggaaacatgtcctttcttgtggcatgtgtaacatgtcggttctttatctgggcattgcgagaaataatgtccagtcttcccacacctaaagcatcgcggaggaacagatgaagagacttgaccaacaggatttctgggataagtagcattcggacggtccttagtatagggtttacccacgttgggacgattccttcctttattcctcataggtcctacattcttataatgagatgctctggcacgagaatcttcatcataaattctgcacatatttactagctgaggaaattgtcgtattccctggtaatttatcgcttgcttaatctcgggtcgtaatccattcaaaaacttaacacacttcgaaccttccccttcaactccttgataatgaggaaaatatctgaccaattcctcaaatttcactgcgtactcagccactgttctactcccttgcttcaactcaagaaattccatttctttcttgtttctaatatcttcaggaaagtacttttccaaaaaggctgttttgaaaacctcccaagtgattggttgatttcctacttccaaccgcagctgagcattctcccaccaatattcagcttcctctgctaacatgtaggtaccaaaaagtacctttctatcagcaggacaagccattactcggaaaattttctcaatttccctcaaccacgattgagctccatcaggatcgtatcctcccttgaaagtgggcggatggtttctttgagaaccctccaatccttgatattctacgttcccagccctttgctgatttcccactgcttgagctaaagcttgcaatgcgtcagctatagcacggtcatttctccccgccattttatacttgtataaatataacaaacaaattaaaagattagaaataccataaccataacatagataatattactgcgtcattagcatacattagttgttacacaaaatactcaaaacatcactaccttcccacagctacttatagttcaagggttacttctagacattccattatcatacattcgtaccccatttatttagttcctacatatatatatatatatttttatttttagaagttttgatccataacctcaactgccacctcattatcttgtcctaccacctcaggagaattatcataataccactcggtacgaatcacaggagcattatcaggtttatcagttccataatacaccacattttctatcacccgatgcactagtctatccggggtccacggtatcaccactgtgtcataatattctttggtaatcggaggctcccttatcgcagattcagctcgatatatcactactttcctacagacagtggattgttcatccaccaattcctcttggtagctttgactatccaccaacacaaaaagcatattatgggtaccaaaagattccattttcctaaataattaccaacaaaagagaataacatgaaattcaaatattaataatacatagaaaacaattcctgtaaatcacacaacacacaagttatcatcacagcaaaaaccaaatccacttttatccttaaaaccaaccatagctctgataccacaattgaaacgactacttctattttactttaattcgtatttattttatgaaattttgagttttttttttcaaaaaaaacaagaataataaaggttcaaataattcctttgttaattttgaaaacaataaagaatcataaaaatatttgaaaatgatttttcaataaaaacgttaacgcgttatctaaataacatagtttaaattattcatacatacttgccatacaccatcattaccagttttgatgcttaaacagttcagatagtccatatagtccatacagtccataatacagaacatagtagaaaacatgcaagcagagaattatcacaacagtcttcaccacatcttcttgtacaacttccatttcactgtttctctgctcgcccaaataattggggtcatcacaggtgtcaaccacaagacacaaaatagggtaagtcatgataaacaaaatttaaatacaaccacacattagatacagaaaattagacttatgtactaattaaataaaatacagaatacgtaccaactaattagaatacagaatacgtactaaataaataaaatacagaatacatactaaataaaatacagaacacgtattaaataaataaaatacaaaatacgtactataattgttatattattatttttttttcaccccttaaatagtttcttttccactcacaacacatagaaaaatgcatgttcatctttattatatgatgcatgactgagatctcagcaacgtctaaataattgtggccaccgtcagataaccccaccctcaccttagtggaacgaacttatccatccggtcagggtagctcagtggcgcgtaggattatcactcccatccatgtgatcttcatggtggtgtggtcctcactgcgtctaccccctagttatatggactcagtttagttatctgacactcctcttcacgagatctaacaatctcatcatcatcatcatctcatacccccaatgggtatatgcacatgaaatgcacaactggttccttttatctctctattattttattttcatcatctcttaacattacagagtcatcttcacagggccttcatcccagactcatcacaacatcacaagggtacaattttaccatcatatcatcacagagaatgatttttaacctcaaatgtatactatcaaccctcaaatcgagttatatcaaatatcataccataatatcaatgtcaacaacaatagaatagatcaaaataaatcaagtatcatcaagataatttctcaaaagataatagtaaaggaaatagttaaaacttaagtgaggttcatttcaaaataaatcatcttatgaaacataaaccatatgttatctatgatttattaaacatgatatctatacacaataattagttaaaggaatatctaagataaataattttagaagcatataacgcatgactaatccaacatataacaacaaactatctatttaaggaaattcatagaattaatgaaatgttactaaataaaattagtatcaacttgccaaaataagtttcaacccataaatctaaatcatttagcctcaattagggagttagattaaattatttatcctctactgtccatcttaattttgctatttctcttccactaattctttaataatttaagtgatagtcctaagcatgatttaatatctaaacttcatttatcaaacctccctataccttaagtatgtttcaaaaatttggacagctgctcctttgatcaagcttcacgtgccttgctcttttccttgaagaaagtgagtgaaaatgatagcttaatgtgatggaagtgtgtacggtggaatattttagagtgggaattcaattaaagcttgaaagcaaagttcaaatgtggtgggctaatgcttgcacggttaattcctttaggctcccaaaaaattctgctgcacctttccttatatagctaacttgtttttctattggtggaactcaaatcccttggccccccatccacaaaatctgcacggttacaagaagataaggccaagtagatttttcttcttcctttgatagaatatgcctttgtatttaatgctttgattcctttggtccccttagctttccacatgcttgtttttaattggttattccttttatcatttgatttggcccccactcttcaattctgattgtatttcacgtgtagtattctaatgcaaaggctattggatttttttcttcttcctatttgaccgtagcaagccttttattcaactcattttgtgcttttcttgttttcttctcttcaccgtgcctttcttcacctaatatttctttttgttttgtaatcaattagtttggttcttgtgtgcacatagacttattaataattccatctttcccctccattattgatcatatggttagtttttcttcaaccaccaatactccacttattttctgttaactagcaaaatcatacttgttggtttaatttttaacattactaatttatcttgataaataagtctagttaacttataattttaataaaactcctaatattatgttcatcacttttataaaattttctaatacttagaatagctttaaattaaattttatttaaaaaaatgtgtatcaagtgctaaaaaaatccctctagataatgaattatagttttctctccgtcccaaagtgttttcttaaatccttattaaataaaatattggggtgttacaccgagcatgctaaacataaatgtcacagacataaatgcccaccctaaaccctaaacccttaaccacaaactaacatcacatgaccgtaccctaaacacaacctaaccatgccgagcaaaccctaatcccttaaccacaaactatcgtcacatgaccgtaccctaaacacaacctaaccatgccaagcaaaccctaatccctcaaacgcaaacagaatcaccacttgaacgcatgcttctcgtcactcaaaacaccttcaaaaatctcttaaaaaacgaaaaaataccagaatgatggcagtttagcagagacagagaacattggaagccaagatatgaagggactgcggagcgggggggccttatttaccaaattggggctgctgcaacatgcctgaatcaggcatgttacaacacgcccaatctaggcgtgttgtaacatgcctgattcaggcatgttgcagtgcaccagatttgtaaatataggcccccccttgcaccagatttggaaataattttgaaagcgcaccttatcgataaatatttttttaaaaaatacccttttggttcttttgccatagggtgttggcatacacccattgtactgtacatatattgatgtataaccacagttgtggtagaaactatgagttgtatgtatatgtacaggttatgctatatgtatgagtttatgattcctcctgattatctgtgtctggtttgtatctgcctatgttttatgtttgagttaactggatcacaggagcttgtttatgatgtttgtggtgtgttttaaattccatgcataatgtaatcaagaaaatcgattctatcgcttccgcatcgcatttagataacgctgatagcgtgcttatgatattattaatgataacacgtccggggtgttacaaaatccacccttttcagtgttcgaatttgaaacttcaattaaataatttattttgtttgttttcctatgtagtttcaaccctttgtagtatttcttatcaatactacatttttgtattctttaattatttgctttttgaaaatgacgtacatagtagttcatgaaacagattggattttgaagaggtgagaattttttttgtactgcacatctcactatgctacaatcctaccttgtaacaccccgtaggcctccgacgtgttatcattaataatatcagattaacacataaaacatcaattaaatagctcagcgaaaacataggatcgttttcttgatacattatgtatggaataacaaaatctcacacacaacaggcaagaacataaatcacgcccctgctgatccagtttcccaaatccaatataaataagacagataacacaattttaggcagagtaacaactatatatatgaacatgtactcagggaaagtctcatatacataacatcaaagttcggtacatatgtatacatctcagtttcacaccacacacggtgctacaaagaatatcaaccctcagaagggatatacagaactaaactcaaaacaaatcaaaatggagccttcaagctctccatgcggctcctcagccaagcagcctagtctctgatgggcctcttaccctgagactactcttctcttccagaaggttcacctaaaaccacataaccccacacggggtgagataacatatctcaataagctcagtatccatggaggaatctcctccaccctggcccactatcataatatacatacaccagtatcacaaacaaatggcccactggcctagccctctggctttctcagcaacataacatatcatacagagtgactacacaaatcagcgcaggaggaaaccatctcctgtaataaagtcacagaataggaggaaaccatctcctatatcaatatctcaaagcaggaggaaaccatctcctagaacgggaggaaactgactcccagtgtgaggccgaaactcacacctgtgccatcccattgggtgctacccttagcatggatgcacatatatggtacctccgagaatagcaggaaaccatctgaactattcccttggcctaggggatcatcatcaccccaggatcatcatcacccaagagccagccatactaggaggaaaccatctcctagggaggtccatatctctctattggccaatagatctatctcaagcacaatcacagcacattcaaaacataatcatatctcagcatataaccagctcagaggcatacatagatcatcatcagaatgcaaatgcccatgcatgtattatgaaatgaccacatctcccccccccggagtgtggtgtggcacacaagatgggaatcatccccagagatactgaacttacctggaacaatatcactctgtggtctggtccctgctctgtggctcccgccaccaataaactcagaatcaacgcctatacaaggcatagatagtttcatatcaatatcaagaccacaggcatcgatcacagatcaaacatatcagaattcccctatcctagggttcaatcaagtctagcccatcattaggcttctcacagaccacacaaggtccatctgggctgagtaccaacatatgaatcaatgtagattcaatgcctcataaacatggcataacctctcatcagcctcagatatagaatatcaatggaatggttcaaccctcgcttaaggctccattccattagccttacaggctcaatacaacatatacaaggctctgatatatcagatgaccagtacaagtgaccataacacaggtcacataggccacacagagccaagatccaaaatcatcagaatcaaaaactgaaagctattccttcatctattcctcgtcctaaacaagtttctcaactggaccctgggctaattctagccccatctcagcatgggtcacaaaactcaaaaaaccccaaaatcacagagacccaagagaacttgaattccttacctcagtggtgacccaggagatctcaggatagcttccccgagctctgatgtccgtctcccaccttaagtctcgactattctcaagttctctggactttctctcttgagaaatctaactcttatacacaaggaattttaagagaaaagatgaaggattcaagcttcccaaaggtttctctcacaatccaaggtcatagaaaggtgtttaggctagtatataaggtccaagaaagcttggagcaagcttcaatggaggtttggggcgtggggaagaagaaaccatgcttttgggccaaaatctcgtaaaatggcctttaaatactggttctgccgacattcctgcgctaatcgcgccatatatggcgctatccgtgccaagttccagtgaaaaacagactttctggagcacttatggtgctaaccgcgccattctggcgctaatcgtgccaactggcagaacctgtggcgctactcgcgccaatctcatgctaaccgcgccaggaccagattcgtcgctaaaaccgtcgctaattctgccgctaattatgtcgctaaattcgtcactaaggcttttgcgacagaattttataatttaaattcttatttcttttactccgttttataaaaagcctaggttattatataccttgtttctcaaatctaaaatgaaactttaagcacatccttcattttttatgcttagagttgaaacttcaattaaatagtttactttgtttttcttatatagttttaacacttagtaatatttctcataagtactacatttttgtattctttaattatttactttttgaaaatggcttacatagtaagttcacaataaaaagatgagattttgaaaggtgaaaatcacttttgtactatacatctcattgtcattcatttctaccctatggaaaccaaaatgaaactttaatgacatcctccctttttaatgtttagatttgaaactttaattaaataatttactttgttttttttcttatataatttcaaccatttatagtatttcttatgaatactacatttttgtattatttaattctttaatttttgaaaatgacttacatagtagtccatgataaaaagatgacttataaagttatttcaaagtagtcaatgaatgttgaagtaatttttaggggctgattcaattttatttgaaatgattgatctaaaatgaaattagttagacaacattgtataattgaataatttgaaatgagattatcttagaatattatgtactttaaattttgtagtctgaattgatcaatcaaattatgttagctatatatattaatacatattggatcaattagtgacacattggttcaacctttaactcattatgttagtgtcttaaccagatcaattatccgttcgttttcacaacattgctatttaataatatcttattagattttgttatatcagttaaatagggtcaaatttccattattcagattaattatgtaatatttttattaggtttgattatagtagtttaattttcaaataagactacatgacaacatatgatatgattgaattaagagataagaagacattggtgcacattataaaatagtacaaatttggtagaactttgcattcactccactccactttgatattcaaatttcaaaagaaatatataaaaattatcattttaatattaatattttgacactattaattttattaatgcattgatcaacttttatcaaataagattgcatgttagcatacgactgaattacataatagaggagcattggtgcatattattaagtattaacaatgttacaaatttaggacaattttcctccacttcaatttgataaataaatttcaaaataaatatgtagaaattaccatttatttttaatattaatttgttttgcaatatcaattgaatatatgtactgggaaacttaaacatttaatagaagaaaatattatcattttaaaataaggtgataatgaacgtcaactagtaactcatttcatttgaaacatcaccaagactatgtgcttattaaaagaaggaatcaatgcttattaagtgaagcatttaataaacattgattgtttcttttaataagcacgaactcttttgttgatgtttcaaattaaatggtttactggttaatgatcatttactacctcattttaaaataataatactttcttcttttattgaatgtttaagttgaccaatgtgtcaattcaattaataatgtaaaacaagttaatattaataataaatagtaatttatatggatttgttttgaaatttgaatattaaagtggagtgggaaaaactctcttaaatttctaacgttgttaatacttaataatgtgattcaatgtttttttattatgtaattcattaatatgctaacaagaagtcttatttgaaaaaaggttgtccaatgcatttgtttagttaatagtgtcaaacatatgtatattaaaatgacaatttctacatatttcttttcaaatttgaatatcagagtggagtggaggagagtcctcatgaatatgtaaaattgttaatttgacattcagaagcaatgttacatattcaagaacattctacctccatttcagtttgatattcaaactttaaaaaaatgtagaaatattaccatttatttttaatttatttattttacactatcaattgaattgatgtattggtcaacttaaacatttaatagaagaagaaatattattatttttaaaatgaggtaataaatgaacatcaactagtaactcttttcattttaaacatcaacaagagtctatttttattgaaagatacagcttatgcttattaagtaaagcatttaagaagcattggttgcttcttttaataacatttattcttgttgatatttaaaatgaaaagagttactagttgatattcatttattacctcatgttaaaataataatatttttccttgttattaaatgtttaagttgatagatactccaattcaattaatagtgtaaaataaattagtattaaaaataaatagtaatttttgagtatattttttgaaatttgaatatgaaagttgagtgggaaaaaaattattaaatttgttacatagttaatatttaaccatgttctccaatgctcctttattatataattcaataatatattgtcaaacaatcgaacttgataaaaggttgatcaatacattaataaaattaataatgtgaaacatattaatattaaacatgataatttctacatatatcttttgaaatttaaatatcaaagtgaagcataggagaaacctactgaatatgtgacattattaataatgtgtacacatgtcctcctaagtgttaaaaatatcaattgaattgatatatgatcaacttatatttaatagaacaaaaaataaatatattttaaaatggtgtaataaatgagcaagattagctaataactctttttgaataagatatacttacatttgttgatgtttcaaataaaaagagttacttgtgtatgttgctcatttatcacactattttaaaataattattttttttcggttctattaaattgtaagctaatcaatacattaattcaattaataatatatacgggaacattgatacacattattaataatattacatattcacgaaggctctacctccactctaatttgatattcaaatttaaaaaataatatgtagaaatattttcatttattttaatattaattttttatactattaattgaagtgacatattgatcaacttaaacatttaataaatgaagaaaaataatattattttaaaacgagttaatagataattgtcaactactaattattttcatgtcaaaaataaacaggagttcatgcttaacaagcattgactactttttttaataagcgctgacttttcctataatgttttaaacgaagagagttattaattgatgttttttttattacttcattttaaaaatatttattttattttattttattaaatatttaagttgactaaaagatcaattcaattagtaattttaaacatattaatattaaaaataaatgctactttttacattttaaaaaaaaaattgaatatcaaagtggagtggaggaaaaaccctcttaaatttgtaatattgttaatacttaataatagacatcaatgttgttccttttattaaatattaattaaactgatgcattgattaacttttttagaagactacatatcaacatataattgaattagataataaagggacattgatacatattatttataacgttgcaaatttcggaggattctctccattccactttgatattcaaacttttaaaaaagcatatacaaattaatatttatttttaatattaatatctttaaaactactaattgaattgaaattttaatcaacttgcacatttaatagaataaaaacatatttattttaaaatgaagtaataaataaacgtcaattaataactcatttcatttaaaatatctacataaaaagtcagtacttattaaatgaaacaataaatatttattaatttattaaatgaaactacttgaagcaggacttacttgaccaaactttaaatgatgcatatgaaaaaataaaacttagtttcaagcttttctgattctttttccctctcaagtttctcaattttttagtaattcacaccaaccccagttgttgtgttggcctttggtagaaagcttttcggctctgcaaattctgttgtaaccaccagcattatgaccgaagggaaacaatttgtcagttttgttgagactaggcaaagccgtataaggtaagtcagaaattatgtttattatggtttttttttttttttatcagatctcaactgcaacttctaatatgatttcaaaatcatttttttcttcttttcaagttaaaaaagtacccttgctttgtttggttaccaaaaaaatatatgatgaccttgcttatatatgtatgtttaaatgattttcgttcaatatattttcatagagtgacaacattaacgttgaagttatcacctcgtacaaattacacaagtctttttatgtcgctttttctttaaattgctcgtttgatctatattaaaaaaaaatgtgttttggatgtaaaataatttattgattatttgttaaggatattttaaaaaaatagaaattaatgtatgcttgtttttaattataaaagtagcttcttcttcttctttttattttaaaaaaaggtaattgatttctttgaaaagctattcaaaatatttactatttttattttttatttactttaattattttaaaagctgaaatagatgcatattttttttataaaaaaataatgtagctcgatatcgtttatgccatggtcaactattggtcaaatgtgccacacagccatggtcaaacattgatttctatgaagagctattcaaaatatttactattttttttaaatttttttttttacttttaattattttaaaagctgaaataaacgcattttttttaagaaagtaatgtagctcgatagcgtttatgccatggtcaaatattgatttctatgaaaaactattcataatatttactattttcatttttttatttttaattattttaaaaactgaaataaatgcatttttttaaataatgtacctcgataacgtttatgccatggtcaaatattggtcatttgtgtgccacacttgccatgatcaaatattgatttctatgaaaagctattcaaaatatttactattttttacttgtaattattttaaaaactgaaataaacgcgcgcattttcttaaataaatattggtcatttgtgccccactgccatggtcaaatattgatttctattaaaagctattcaaaatattactattttttacttttaattatttttaaaactgaaataaacgcatatatatatatatatatatattaagataatgtagctcgatacgtttgtgccatggtcaaatattggtcatctgtgccacattgccatgacactcaaaagcagaacttcaatccctagacaaaccatacaatacaaagggaaacaaaggaacaaaaacaaaataatactactagctggtcctaggcacagttccaattgtaccctcttgacaatttgatgatttatgcctttaaaaccctaattttagaaaaattctttttctggcaaagccaaatgtctttctggttcttggaactccccatgtgatgtaaggaactaggagacagaaacatccctttataagacatcccttgttcccatcaaaacagtgaaacactgtggcccataagagcctacaactacaaacttcaaatcctgtaattgaattcttaggtgagaattgagttgaaaaataaaacaccttctccccccctccccccatttaattctcttacagcataaaaacgttactacaaatttttatttcttaccctaatggcttttttcacttaatttttgtctctacattaaataattaaccattaatctagaacatagtggatgtgactttattaaatgaattgacatactggagcggaggcatagcggagacacgtcaaggacgtgcaacaataattggtaaggtcaaatttgaaaaggactcctaagacagaatttctcaaataattatgtgagttatgtttgaaagtactgtatagtttttaagattaaagaaaaaaaataatctattttatttatttctaatgaatatgtattttataattaatttgaacgtttctaaaataaaaaattataaactaattaacataaatttaatatcttaatcttttgtttatatttaggaatgttatacatttctcttaattaaaaagtaaaaaaattgtcttttccaaaacttcactctaaatatactatctaagaatctaatcataaccactttcattcttattaaagctagattgaaggtgtcttcattctatgttcttcgattaaaaatgacaatcttcatgagctttgtataacaaaatagagtttaattttgcatcatacttgttttatatgatcaattattaagaatcatcctctatattttattttttaaagtaattatttactaaaatcgataccataaaaataaaatatttgattaaaaaaactttatattttgcgttacattctaattaaattaatgatcaatataatgttattattccttcctaagaaaaagaagtactaaatgttagtacataggttgtcatgggaagtctaaggagagcgttctatatattaaatgaagtcaacaatttattttttctttctttctttttccctctgatgtctctctcatattcacgtgctttgagcaatcttcagtaataatcatgattggcttcaccttcattcttcaagtataagtaagcaatcatacatagcccacaaaatggtccatcaatgtatctatctacccttcactatcaaacattgttgacaacttatgaaaggttctttcacccaacaaggagcataaactcaacaacaacaataacattaacattaattatcaattgctgatgaagcaatattgtgcctcattaatccaaccctttttttcttcattttgatgttctaggtgtcccagcctcgccaaagttttcacaactttcaaaagggtcttgcaagagaaggacttcacacgttggcatggtaacaacaaccaacaacaacaccgttttctagcctgcggcaggttttgtgtaggagggaaggcagcaatggaagatgcggctttgattgattataagagtgaaggtgttgaaggaagcatagaatgtgaaagtggttgcaatgatgatagttttactgatttgattaaaaaaaagggtggagagagaagttccaactctgaaattcttttatctgagatgacagaacttgatggtcagagtcaaggtagtgcagaagatgcatcttcatcaacatcaatgaggtttcaggaaatgtctgcatctaacagtacaagtccacgtggaagtgaagatgcagagaaaaaggacttgtgtaatgagaattttgaggagcaagtatctgggttatcaatgtcaggtattcaaattcaatgtgcttctgtacataatctatgcctttctttttggttaacataatttttggcctagttcccatgttgttaattgttcttattttttctctctttataataaattttgtgtgctggaaatgattgataggtcttggggtgccaacgttgttggaatgtcaaggtcctattgtaatgcatttagacatcataatctttataaaaaaaaatgagacgagcaggagtcaaacctgtgacttgtcacatgtgagacttggatttgctctacttgaccaactccttgcgatatacataatctatgtttaatttctacaattggggctcctggcttataatatcaacatagtatattctctaatatgattttggttctcagtgctagagcatgaattgatgaaggaaaggttcgcaaaattgttacttggagaagatatgtcaggtagtggaaatggagtccctgcagccttgacaatatccaatgccatcactaatctatgtggtatgtacccatgaagcagtttcttgatgcaggtttcatttagtgaaaatgtttaattactgcaattcttgctcctgaatctgatgttctgattgttgtcaaaacattttctaaatctgtagccaccctctttgggcaactttggagattagagcctttggcactagagaagaaagcaatgtggcgacgagagatggagtgtcttcttagtgtcagtgattatattgtggaattgaagcctacatggcaaacgtttccagatggaagcaaacttgaggtacaagtacagcttcaggaacaatttgaatgtgcatttatgtagctgtatgatgcatgttttgtttaattataaatatgtgctcctttcggccttcaacccttttgagataactttcatttggcatttgaagcacaagattttcagaagaaaataaaaatccctcagttttccctatggtttgtgaatggctgaattgtctggcattcatttgattaatattgtaatgtcagttagatataatcatgaaattttaggattgcaaattgaagttgaaagctttttagtaatttttgctagatgattcatctgttttgaaaacaaaagcataaaatttaaaatgcaaattgatatcatctagctgagtaaggtactcgatcatgattttttttttttgacgtctttatgattagatttacatgtatgtgttaaaaatgtgctccaccctttaactgtaagatagtcatcatcatgaacatgcattgcatgcacaatgcaatatctgcagggtctgactcttgcagtatatatataagtaataagatcaatctaatatccatgctttcttctttttagattgattaaactttataccaaataaagtacatatagatagttcttgatgtttaatactgtttcttttcacatgtgaatcaggtcatgaccactaggcctaggtcagatctttatgtcaacctgccagctttgaggaagttagataacatgcttctggtaagattttacatcattcagtgtacattagtccagtttcaagaaatagcacatactaaacattttctcttctttccaaaggaaattctggatagttttgttgatccggagtttaggtatgttgaccaaggggttctggccccagatgcagatggttcatcttcgttccgccaagctcttcagcggctagaagagaaatggtggctccctgtacctcaagtccctccttctggtctccatgaagattccagaaagcagttgatgcacaagagggatagtacaaagcagatattaaaagctgcaatgacaattaacagcattactttagctgacatggagatccctgatacatacttggaatctcttccaaaggtataatatgaatgtccattccctattctttcaaacatcatgcgatactaattagtaatgacgtatgtgcatttggttaaacaatttagttaaacacctttttaataaacttatcatgtactgagggcttatatcataatgttaattgagaaacttactgaaataagctcaaaaaaaattaatttgaaataatatgaatgcccattccctattttttcaaacatcatgagatactaatgacatatgtgcattggctaagcaaattttttttcgaaaagcaaagatgaagctcttattagagggagacgaattgtgacccaaagaataaaaaagtacaaagactcagagtctaacagaattgtaatctgataaaatcaaaagatacagatcaataagacatagaccaatatactcaagctgcttccttaagacattccaatggttaaacaatttaattaagcaccttttagtaaacttatcatgtgagtgcttatatcataatgttacttgtgaaacttattgaaataagctgttattctgatagacttaactatacaacttattgttattgaaataaattaaaaagagtttataaattactttcataaacccaaatgtgcattagttcttccaaactccctattaaaacttgtgttccaatccttcttttctttcagactgcaagagccagcttgggggatgtcatttacagatatattacaacagacaatttttctcctgagtgtttgctatcttgccttgatctatcatctgaacatcaagccatagagattgccaacagagtagaggcttccatttatatttggcgaaaaaagatgaactcaaggcctactactacaggtcgcactacaagatccagttcaagatcatcatgggaaatcttcaaggatctgattgttgagggagataaaatggaaacacttgtagaaagagcagaaagccttctactctccttgaagcagcgttttcctgctcttcctcaaacagccttggatatgagcaaaatccaatgcaacaaggttagcatatctaattgtttataatgttccactttaaagccttttcatgacttttgttttttggtagttttgtgttagtccctacatttaataaaaacatttactaaatgcatctaatacagttgtaattgattgtggttatagagacataaaaaaccttaaagttgtaatcacaattgcagttgtggatcattttttaaaaccttgatcaacaatcaatagggattaaaagtgtgatttcttaatttttaagacttataataaaaaagatcaaattttcaagtaccaaaatatgcctttagcctctttatatttgttggttgttgaaaattttgatctcaactcttcaaaattgttgtatctttttactaggatgttggcaaatccattttggagagctattcaagagtactagagagtttggcatcaaacattgtagcacgcattgatgatgtgctctatgttgatgacttgacaaagcactctgatccaatctcacctctcccaagagttggtgtaattgctcacaagaccatttcagttccacactcaatgtctggccaaagcactcctcctccatcatataagtcatcttttggcacaccaagcttttctccggcacaatgtattaatcctgcaaagggatcaaaatcaccattcatcaacagtggcaaccttccccaaagaggggtaggagttagcaaaattttgactcattttggtggcattgagaggaaagagaagtttgttccaactttgaaaacatttgatgaagttccatttagaacatttgatgaaacaaatatggagtccagtgattgcacagaagatgttaagctcaatgtgctggacagggcatggctagagtgaaggattttaatgtacaaatctttcatcaaagtttaattttgatacattatcgatgtaacaatttttatattgtcagctaatttagataactttccaaatatgaattttgaaataactacttaatgtttaataatttttcataatatgatgattcatatttggttgacaataaacaaattatttacattattagtgtatttcaattaaacattttgtcaattatattttcaatctttgtagacatatcgaatatgtagaagacatggttttaagtcgagactgtgatttggtttgcaatcacagagtgttgaggtagcaacagtagtcactcctatttagatgttgtggcttcatcatgtattgcagttcatagttttaaaatcttaatagaaggattacagatttagagaacattatttaggtttttaacaaacttttggtccttaaatatgatattccattgccctctatattatatgacaagtgtttttcacttttcaaatgagtctccatttataaagctattctggattatgtccctaccatcacataaaaggaccaaaggggagaatggatagaagctgaattgaaaactttcttctttttttttatgtaaaagtcaaattaaaattgagtgtcacatgtaaaaaaaaaattattgttgaggtgcttctagttaggtttctatcatctatgtgctattacttcttgaatcaatgtgaatatgcaaaataaaaaatggaaatatattttcaaaaccttatgtaaaactaatgaatttgctttggccaaaggcatgtctaattgtctatcactagtgtgcgtgttaaaacttatttactagcggttgaaatgtgtgtgcgcacgtgttatagaactaaatggatgaatagcattagctgtcaatatatcataaatctagcttatccagttgagcatcaaagaagtgtgtgctagtgttattgagaccaaagtactggcgttttttaaagataatgaatattaatttcttccataaactactgcataccatgtaaataaaatattgatgcaatgctaattatggttattgatcatcaagtagatgttaattgttaatgatgtattgaattctatattggtcccactacccccgttgaattataaatagcccacacgcacttgaagtaaagatatgtgtagtgatgttcacacttggttgaattagtgttgaacttacatttcacggttgacaaaccagcattggatttacagtattcagtaccaagaatacaataattaattacattaatagttaacatatgttaaaatggataatggtggcgtatttacatataccttaactaaatcatacacttcaaagccattaaacttttagtcttattcatctgttttgaattcaatctttttaagttaatatatataataatgattaaaatagatgtttagtttcggttggacagtaagtttaaaaagtttaaatttgataaaatgctatgttagaacaaactaatcatttccttaatttatcaagttatcttagataatttagtgacatgtaacaaactatcagaaatgacacatgtgatgaacatttgtcacgtcaaccaaaatgaaggctgcaaaatattgatgaaaggaccaagttggtctaatagaaataggaccaaaactaaactttaaacttgagagaccaaattaaaaggaaaaataagataatagaacaaaaacttgtattttagcctataataatagaaataataatgcgtatacaaacatcaattcggtctactgaaatacatatatgaacaaaatttgaaatatttgaactttagatgacccgtaatttcagttttcctaaaaagtggaaatgataaagaggtgacaagataccatgctctatcttatagaatgtgagtaatgacaacatctagaagcataaacaacaaaatgggattttttagaaaaatacaccacctaccttgattaaacaagaaaaggaaacttgatgggtccatatttcatcaaaacagtttttaattttataccaaagtggtgcaataagaaattcacctattgtcctagtgccagctccgttaatccaatgggtgactagaccaagcacttttttggtgcattttgggctataaaatgccatcagaagcaggggtgtttgtcacactgattgagaaaaaaaaatggaggcttacactaaggttttttgcattcttggccttttaatttttgtgagcatttcagatattcatagagtggatggtgcaggggaatgtgggaggtctacttctccagatactgaagcaataaagcttattccttgtgtctctgccgcaaaagataaaaatgttaaagttactaagaattgctgtgctcagatcgagaaacttggcaagaaccctagttgtctatgtgctgttatgatatccaacacagcaaaaatgtctggagctgatcctaaggttgccataaccatcccaaaacgctgcaaccttgctaatcgccctgttggttacaagtgtggacgtaagtatattttattggtttaaatacattctacattcttgcaatttatagtttttttcatttttgtacctgaaaaaaactttactttggtacttgcaaaatgtgtttattttatttttcatccctttagataacacttttaataataaaaagaaagttatttgaacagttcaaaaaagtctatctaaaatgtttgaaggatgaaaaacaaaccaaaaacattttacaagaactaaaatcaaaaaattgcaaaaacgaaaatgaaaaagcgatacattgcattgacaaaaataatatttaaacctattttattttctactcacttatatctcgtttttttttttgggatttgacttctctaaaccaaatagacatgtaaagtaaaaaaagtatggatatataagtctatcattaatttaaagctgtttataaaggttttaaattgtggttgtgattacgattttatcgtgtttttttatattgtgagaaattacagacaattatagccgatgtgatcattatgttcataaacattctaaaaaccttgattcatgctgagaaaaaatagtttaattcaaattaatattaagtacaactttctcatgtctttactttagaaaggttataaatgctattttcctatagcccttttcttgatatactcataaaaattgctgatatttgcagcttacactcttccttaagattgtactgagaacaaggagggatttgggcgtgaaggcacaaaagctgttggctacaactgtgactacacaactatgttttattgtccttgaaacaatttgatcaataatggctagtagctatctggtgtccttcctgaataaaactagcaattttaatgtttaatgtttctattcctatttaatatataaacatctaccttttctctgttttttttattccgatgctattgactcatctaaaattaaagatagaacatgtaaaataaaaaataaatctctctgtctctctctatatatatatatccttaatcataactaaagcactgtataatccactttttttagtatagatttggagtatcttttatagaaagtcattctggttgagtaaaatagtatcattatagacaataaagtttttctccgaatatataagacaattatatatctaagatttgaatttaagactatttattaagctaaaataattttacaccaatatattaacgtgttcggtagtgaattaattcactttaaactcaagtataaatacaccattactttctcacactaaagaagccaaatgggatagtgaaacatggcagacatagtcctaagatgtgtaagatagtgaactaagccagctaaatgtagtggtgctatgtttgacactttttcaagaaccaataacattatggattaaaaaaaggagataaaatcttcaactaccagacacaagtcacagcaaaaaggaagaaaaaaaaacaaaagagagcagacaaagcagcaaagatcccaaaggggtactgaagaggccttgtttgtcccaacgttaattgatggataaggataaggataggtgagggtgtgacgggacagattttgaatgggaaatatgctgagactcgaagtctttattttttttttctttgagctaagataaaaaaggtgaatagactaattggttaacttagtgctggacaggtttgtgtattattatgcttgctggggccacaatctttgaatgtggttatagtttttagcgaccaacaaagttcaacataattggtagatggtaaaattctttaagaatgctgatagagattcgattctctagccgtgtatagagaagagttagaagatttggttgagaaagacaaaactcacttcgataatctctacagctcgagggttagttttatgactttcgactataacttacgagaataacttgcttccagataaaagaaaaagttatagcttttagcagtgcatgacagtgtcttgttgactttctttcaagatggttcacgaacctgtctatggttaaatttctcattgttgttgttttctttgaatgattcgtgcatgcaagttttgatcagcgcatgtgagaggcgtttaaaattgatggatgagagggaaaggggggaagtgaaaagatgtgtgtgtggagatgagatgattcgattattatgtgatgagatatatgttagttgtcagttattatgtgaggtgctttaattcgatgtgcaactaacatgcctctttaaggaataattttttattgttccaagtacggttaacatatctactcacatcactctgcagcaataataatgaccaagaatcaatagtactagcatatggttttgtttgtcacaaaaaaaaagatatgtagatcattggtgagtgaacaagtttcaacttagaagttatcaagttctctccaaaaggtgctccgagtatctagttactttagcaataatgtgaagacaacaaatcatgtagtttttcttctgaaaaataattgtaagacaagagacactattaatattatcgaacaagacatgacatgttagaattctcagcaaaaacctactaaaagaattactacacatgcataaaagaaagtcttgtaacaataatgtacagaaaacaaatcatgtagtgttttttgtggaatgagaataaacttctagtagtattgagtaagacaccaatgacatggtggaagtgttagcagaaacctactcaaaaaactatacatgcataaatcacaagcaattgtacttggtaactatgtttcaacctcattgattttatagagaaaaatttagaaaaagatgtgaattatgcttctaacaagaccatgaagccttctaaaaatcttcttgaaaagagaaagacgtggtgatagaaccatgtgtgcgtggttggtagataattaaaaaggctacttaggcgctcgaatttttgatcaatgtcaaaccatacaaatgaggaagaggagaactctaccacatattctccaattaaggtaagtgtaaccggtttttggttagctttaagagaaaaggttctttcaatatttgattatatgaaatataagtatcttatcagaatatgttaggtgaaaagtcattttgacatgatttattttgtttagactttggttgttatagactgttttttatagtaaaagttcaaaaggggatataaagttatagttggttttatatttaagataagttatcagaaattaaatagaaaaataaaaaatagctaaaaagtaagctgttagcttttaattataaactcaaaaatcttgtttattatcaaaaagatttatccatgattaatataaattaacaaaatacttaaattaatagttattttctattaatgacatgataatcttaggaagtaatctaatccaaacatgataataagatcaatggttatagacatatttatctgtaatcatagctgaagtactaaaatagaggtggaacaagtaaagataatttcttccattaaagtgaataattgcatagctgaagtactaagatagaggtgaaacaagtaaagtgagtttcttccattaaagtaaataattgcaaaggttcagccacacaagagtagctgataatgcatagaattcctatataacttttgcaataaggtgaggataatatcctttacaataaaataaaaaagaaacgcaaactattatagattcatcatatcatgattctgtcaaagccagagaaagtaacttgctgtccacaacccttctgattactgtatagttcttccatataacaaaagatggactatactgctaaactatctagctatgtacctgcaatatccattcatttgattaataaacaatgctagaacaggaaatatgactagagttttagaatcaacatcaaatgtatacataattatatgaatcaattcagaaatagataagaatcgtaagatcctgaacccttcagaacaaccctcttcgttttctaagacttgttacttttcaatctatgtttaaaaaagaaggaaacactaaaggatatctaagaatgtcatttgactataaagttttgagaagatcatatataccttgagaagcacatgccttgacaagagtgatcttaataatagagaccccctgtggatagaaagttaacagacagcagaagaatgagaactttgtgacagacaagtacaatgcatatgtaaacttttagaccacaaatctattagacaagaatatatgtcataacatgccttgccaccagtttcctcttgaagcaaattctgaatcatcttctccatcaacattcttgtgctgctaaacaaaaaaaaattatgttagacattcttcatactagaaaataattatcaaccaaacaaaataggaatatcattcaacctgtgatctagaggtcatgaggcagcaaccttagtgtcatgccaaggctcgccgctcctctagtataaaaacaaaaataacaaatgcattgccacttaccatagagttgaatccctcattctgtgtactctgaggactagaatagatgtcctggccaccataatagattgatgaactaaggtgacatggttggactctttgatcctgatagatggaactcatatccttgttcacagcattctgagtctcgctaccattgcccttggagaagttatctgcattgattggaagggataaggcatggaaactaagaaaaaaaaggggggaaattttgaaaagaaacactatctaaaactactaaaaattcggtcctatagatatggatatatacacaggagatatcattccattatgcaaaattcgaccagctaaattcaatggaactaaactcaatgataaaatcttcaaatagatattttcataatcttttctacttactcagggtgcaggataattcagacacaaggaaagtaaaaaaaaaatggaaaatagcgccaataggaaatatgccattatgtgattttttatcaaaattgcattttaaaaagttatcaaaaattatagatagtggccaaatacgtaaacaccaagggctgaaaccgagtatcataccttgaatacaaattttggagctccaggtttcattggcaattttgccactcaattcagagcgcagagactctctccctaacacctaaaattgaaccaaacgaatccaaaaaaaaaaatctcagaaccgtttcagcatgactcagatatgcaatgaacatggacatgtcacatgggccacatggtatataattcaaattcaattaaaaactaatgattcagacaaatacttcaacagatagcaaaattcaatcattcaggtggcaatgatcattgattgtcagatttgacctcaagttaaaactgaattgcaaaaatgaatatatatatatatatatatgtatatatatatatatatatatatatatttcgtgaaaaacatggcctaaaagaaaactcagacttttaacacaacaaaaccaaacacataacagacaccaatcatcaacttcaccatgaaatgcagaaaaaacaaaaacaaagggattgattttgagcaacagcaaaaagcaaaagaatcaaaacagaacaaggtgttgaaattaaacacacacacacacaccttagacgatggaggagaaaaaatggagccaaaaatcccagaagaagagggacgggactctttggacccaaagagctcagaggtgaatgaagaagaagtacccttttgcttattcccttccattcttctctaaaacttaaaacttttgtatcaaaatcactactttggatcaaaagtgagtgtgaggtttctttatatagagacaacccacaaaactacaccaaacaccgcctgaaaaaggcctcctccaaatgagaaaaaattacgtttttctcgggaaacaaacagaggagagaagagaaaaggaacgttaagagaagagaacaagagaaggaaaaggagaggcacgtgaatgaagagaagtgtgtgtttttcaaatgaaaccattcattcctcacacccttttataaggcagaaaagatggactactctcatgatatgtaaaaaaatgagtttcaactttcaacctttgctagtaattttcttacttggaattttgggttttctttttttttttttttttctcttgtaataaccccaaagagaaattgaaggaatcaaatcaatcagagacagagacagagacccagagcagtttctttctctctttgctcgggttttccgtttttctgttcctggttttccacttcttctaaagtccttgtgttgagttcagcatggaacagaaaactgccacgtctggctcttgagtcatagatgtgggccctgaaagcaaatcccaaccttttactgccaccatcactttgaggataataatagcacatttaattggagatccaaatttgagatcttaaattactttgtgatggatcttactttgttatgtaagatggaagatcttttaagatttgtaacattttttgttttagtggtagatctcaaattgagatcttagagcacctttaatggatcccactaaattttttaattttgattaaattaaattaatttaattaaataataaattttaattagtaatgtatagaaaaaaatatattaatattaagaaatgacaaaatttaaataatttttatttataactaaatgttaaataagtgaaaaatacatgaaattgataataaaaaaatgcaagacattaattttaaagaaatatcaattttcatcatttttgtgaccgaaatgttcccaaatatgctctaccaagtcggcttgaagttgttgatgaatttctcttgtatgcataacacgtcttgtttgcaagtatgtaacaaagtcaggaggaacaccacgagatacttcaacatttgaaatgtcattatctacgtgatcataatcaacatcgacattaccaccaaatgtatctcgttcgtcttcgacaatcatgttatgcaatataatgcatgccaacattatatccttcattgtatctatgttccaggaacgcgatggaccgcatataattgcgaatcgagatttgagcacaccaaatgctcgttcaacatcctttctcactgcttcttgacattttgaaaataatttccttttcggaccttgtggcattggtatgatattcacaaatgtggcctaattaggataaataccatctgcaagatagtaccctattaattgaaaattgaaaattgaaaattgtactggaggagctcgaccttgcaaaacctcatcaaacacaggcgattgatttaacacattaatgtcattgtttgaacccgcaactccaaaaaatgcatgtcaaatccacaagtcttgtgaagcaactgcttcaagtattattgtgggtttgcaatgatcacctctatgaaattgaccctgccatgcaactggacaatttttccactcccaatgcatgcaatcaatagaacataacatacctggaaacccttgtgcagctccaatttgtagaaggcggtttatgtcattgttgttgggccttctcaagtactcttctccaaatatctcaatgacaccccttacaaatttttgtaagcattgagttgcggtgcattcgccaattctaatgtactcatcaacacaatcagcaggtgatccgtatgccaatatacggatagctgcaatacacttctgcaacggcgagagacccattctaccaacagcatcaggtctcaattggaaatactcatcgtggttactaagagcattcacaattcggttgaacaattgtcgccgcattcggaacctacgtcggaattgagtctctgtgtaaactgaattttctgagaagtagtcattcatcaatcgtagatgtccatcttcacgattgcgattaatgactcttctatgccttcgacgttgattgttgttgcctccttgatgtttcatctcacgtagatagctcaatatttgttcatcactatcttcgtaaagtgtttgataaacagtttctttccaaactctatcaaactcattatttcgatccattatatgaatgattgtaggagatgtgcaacaatgaatgagaattgaacaaatatatagcaaaccaaaacggctagtataacggctagttttataacggctagtttcgtaacgactacttttataacggctagtttcgtaacggctagttttataacggctagttttgtaacggctagtttcgtaacggctagttttataacggctagtttcgtaactgctagttttgtaacggctagttttataacggctagtttcgtaacggctagttttgtaatgactagttttatgatggctagttttgtaatggttactttattacttaaatcaaattaaaagacaattacaacaaactaaaagacaataacaacaaaataaaatacaagtactttaatactaaattcctagtttacgcctaattatcttacaaaaggcttgatggtcttggagttgagtttcagacattgtagatgtgtctttcatgagaatgtcgtaatactctttttccagttctttctctcgtaaggctgctagtttggcgttcacaatatttctttccttcattgcttcctctacaccagtcaagtccacaacattggtagatgttcctactcctttccctttgctcttccttttggctgccttttgccccattggacgggcaattcgagacggtgtgtcagcttcaacatcttccacttgtgtttctgcattagatgacgatgaatatgtcccagatgtagaaatcttcgttctcttagaggaattttcaggaaattggtctaaccatttcggttgatctttcaaaagtcgccaagcatgttccaaaccaaaatcgcatccttcgtcttccttccatatggcatatgcatcaagcatgacattgttatccgtgcaaccacttttcttcaatgatatcgtttgcttgtaatgacctttgaatttttgcacgcctagattaattttttgccatcgtgattttagttgattcaatgccctttcgcggagttcacctctaaaattgttgtaattttccgtgactctcaaccaaaacgcttcttttccttgaccaacaccaaaaactgaatcgtttgagatgttgagccatgaactaatgaggcacgtatcttcttcaattgtgaaggcgactcgagccttcttttttgtagaagatcctcttacttcctcaacgacgacatcttctagcccaatttgggtagaaaactgtggaaattgtgaaccaactacatgattttcaaccatggtaggattgtttgatggcatcgaaggaaatgtttgagaactttgagaattttcggtggacggaatttgagtgcttggcataaaataatttggtggtagtggtggtaaaaatggagggggaaaaaagggggggcgattttctgaattttgggttgaaggaggcatgtgataattttgcaaaaaattcatataactttgtcaatcaaattgatttggatccatttcacacaagtaaaatttaactacaagattggagaaaaaagattcacaaatgaaaatgaaagtggtatgcatcaatggttagttgtgaaccaatttatagaaaaaaaatttcagaaaaaacggctagtttaacggctagtttgtaaattttaattttttgtttttttttttcatttttccatctcctcaccccccttccctccccttcacaccccctattcttttattttttcttacctccaacggctacttctttttatttttttttctctgcccctcctaatcaacaaacggtcacttcctcttttctttttttttttctctccccctctctagaatcttccgttaccctccccccccccccactttctttttttcactcaccactccctcactcactcacgttcaccccccaaccccctccccccactttttctttcccattcctcattcccctttcccattcccttccctcagtcacgttccgccccccccccctccccctcccccacacttttctttttttctttttcttccccacccccacacgaacgtcccttccccttcccctttcccctcccctatttttttttctttcttcttcttctcccccccccccccatctccacccgttcttcccccttccccctgcatttttctttctttcttctctctccctttttttctttcttcttccccccttttctttctttttccgctacctccgtgctcccttttttttttctcttcttctccctccttcttacggtgcctcctctacagtccaagcctccccctcctctgtttccctcaggtatcatcagtttctttttttttctccgtttttgttggattgtgggttgttgatcccgcccattttgtggtctgttagaataaaaatgtattttttttttttggaaaatgtgtggatcttgagggttcttgtggaagacccaggtctccacgtggagatcctcatctcccctttaatggtagatcttgaaaagtatagatcttcaactcaagatttctctctaagatccagtactaaaggtgctctaataacagacacccaacccttttgtccattgtcttcttagctgggttgttcggttttcgttggatctttcactctttcaagtttcaaccacttctttttttttcttacttttattgttttacctcagaattaaataagtagtagtatgtattattattggtattaaaaaattctattgttaattcattgaaattatatttagaagacttttaacataattcgtttttggatatgttcgatgcacacaagttttatcttggacgtagattataataattatataaattataatttatattttttacatattttaaaatgtattttgtaattaaatactattgatcgaagtaaaaaaaaaatctttagatattttatatacttataaacatttaatggtttaaatgtagtatttttaattgagtaaaatatttattttattttttagtttaaataattataatttttaattgattttttttaatatatgtgtgtttagaagtaacaatttcatttattatataaacaatattattttatatcatgtaataaatgaatgtataataacccattaatgaatacaaaaaagtaaacatttatcaataacaccattaaaaatcattaattttctctcaatacataacaataaatatacatttaaaactcactttttgtaaagtgtcacgaattaatatgattcattaagttttcaccaaaaataaaaatatgattcattaaatgaatggagaataaaacaactagcaaaaagaaattgtctatactacccttattttttacggaaaaataatgatttaaatacactatttttaattgggtataatatatattttattttttagttaaaatttaaaatttctaattgatttttttttatgatatgtgtgtgtaaagtaacaatttcaattgattatataattactgatggaagttaaaaaaatatttctttaaaaattttatatccttacgaagatttaattatttaaatgtactgtttttgattgggtaaaatatatatattttaattttttgttaaaatataatttctaattgaattcattttattatatgtatgtgttaagttgtaacaatttgaattaattatataaagaaaattcatataagaaatgaattataataatcaattaatgaatacataaaaataaatatttattagtaatagcattaaaagtcattaactttctattaagtgtgtcatgaatgaatatgatttattaaatgaatgaaaaatataacaactagtgaaagaaattgtctaaactgcccttattttttacaaaaatgagtgcatcaaaaatttcttactttatcttataaaagataattataaaaattaagaaaagttcaaaagaaataaatttatcatatattataatttgtgattaattagtatattattaatgcatgtgttatttattcttttattttttatttttagaaattatatatatttagtatatttcaatatagttattataaattaataaattattataatttttaattgaatgatttgtattattgtgactgaatgccaatataatattagtaatgtattatttattattttatttttagaaattatagttagtaaaagttttaagatggatattataaaaattaacaaatttattatattgtaatttgtgattgaatgacaatatattattagtgcatgtatcattatttttttccttttttagaaattatatttaatataccttttaagatagttgataaaaaatttgaaaaacttactatacattataatttgtgattaaatattaacatattgttaagggatgtattacttattctggtttttcttattaaaaaatatatttatcattaggtttttatagttattacaaaaatcactaaacttatcacatattgttttttctcattaaacgacagtatattgttagtatatgtattattattctttgatttttttttctttttagaaatatgtttaacataactttttatggcaatttttataaaaataattaatttattatacattataacttgtgatgggatgattgtatattattagtgtatgtattattttattatttttttccttttagaaaactatatttaatataacttttatggtaatattataaaaattaataaacttatcatatattataatttataattgaatgacattctattattagtccataaatatatttcaatttcctttgtggattggtttgtattattttggttccttgattttgttcaagttatcatataggcacacatagaaagcaatactttgggaaagagagactagaagtgagaataggacctcaccagatcatgtcttactcttctagtcttttcactacaaaaataacgtttatttcccacgaaatattttcgaacgaaaacgaaaatagtatgtgggtaacttcaggaataaacttaattataatttattttttagtatatttacaaaacctaaaagcaagcgcactcatcactcctcacgcctcactcactcgacatcacggcgcacacacaaaacccttcagcgtgtatcactcccttactcagtcccttacttcgcaaaagagaagtgacaatggtcttgcattgtgggtgcttcatcccttccccgcagccctcaaggtcgccgtcgtccacgacctcagtccctcacttggcgaaagagaagcgactatggtctgcaccatgggtgcttcatcccttccctgtagtgctcaaggttttcgccgtcgtccacgaccttaggttgggaaaacaaatccacacgcctctgtcctcatcgtcatggccaactcctttgtcaacatgtacgaaaaatgcagggatctctgcacgccaagtgtttgataaaatttccaagcgagaccacatgtcgtggaactccatgatcgcgacactctgccgatttgaggggtgggaactgtcattgcatttgttccggttaatttttttggaaaaggcatattttacataccatgtttgtggatcttgatatcttgtcggatctaaaactaaaatattttttggtcttttaaaagaagacttgttctttttttatattaaaatcatggcattatatagtatataattatttgttaaaatctattttttaataaagataagagaaatgtgtcaaattgtaactgacaacaatataactattatttttaacaaaaactaacaattataagtatttaaagaatacataataaagaaataacaaaattatgttctcaaatttgggtggggtgtgggagtttagttgtttgctattcttcactatcacttcaaaatgttgaaacaactcaaattttgttgcttttttgagtcatgaataaattaaagaaggttggattggcaattagaaaatgacagagtcatttgtaggaaattgggttgataagggcatcgtgtctttgttcattattatgataagctcacttatataatattgaagacactcaaaagatcaatttcattctttagacaatggataagtaagtctgagtactacatgcagttattctagctattacatatattgagaagaagaagaaaaaactattatatatatatatatatatagagagagagagagagagaattaaatatattttattgcacggttccaatatatatcacttgtaagggtattatcaagttattatataatccatccactacaaagtaactgatatttaaggttttttcactcaaattaagaaagcaaacattccaaaagaaataatatttattaagtgacaattttattaaaatattcttattctttcttttaattttaataaatacattattaagtctttcaagaaaataatatttattaaagaaaacaatattaaaataaaatgtttgagtatctcactgaattatgagaacataagttaatttggtataatttttaaatgttaaaactgcacagagagggaataatacttatgtaaattataaattaatcttactataaaacaagatcacttgggcatggggattgaaaattgcagatagcaacttatctagtaactaacatatttttttttttatatacaaataacattgtgtttgattgtgtaaaaaaaatgaataaaagaatcaagaaagaaaacgaataaaagaaataaatatagagtagaaaaaagtggaaagtaaagattgttcagttgatgtgaaatagatgagtaaaaaatatttgaattaaaattatttggtaactcgacttcttcctcttttcatagttctacaggcaatagttaacaaaatagcttttataggtataaaatcggtagtattagtggttggtaattggttaactgatagcctccacacaaaaaaatgacaatcttttttgggataaataaattccaaagatctttatataaaaggttttcaacaaggttgaggttatggaaagcatactcatgtaattttatctgagtataacgctcctgaactacttttccataatatcttatcattcacattgtacttcaaattaatcctttctatatcccccgcaaattcctccaccaatggtaactcccaaatgaaccattgtctcctccatctcaacctccaatgccatgtttcaccattccactcccctacactacccaccaaatcatcattttcacaagaatttaagatataatgtaatattaaaaacaatcaaacataacattgatttgttgaaacttaagacataaataaacattacaaatataatcatccaacatgacaaagataagtcattaaatatgtacaaatctacactactaattgaatcaccaaacaacacaaaatatcattcaatatatatgcatgtggtaattaaattaagatagatttaagactataacttttaataattaaattaatagttaccaatgtatgtgtgcatgtggtactttttcttgtatatatattcaatattctaattaaataattatgtgtgtttacatgtgcatgcacttgttggtgagatctttttttcctagtctatgtgagatattttaattttagggttaaataaatttttaatccctcaattacttcaaattcccatctttagtctgtcttaacatttttacaagctttggtccctcattaattttctgtcaacatttttagtcccaatgttaaattgaatctattaagcgttggtatgtcaaataataatccatgtcagcacacaaccttatggcaaccctatgttgtgcaatgtgtcattagatggaggcattgcatgtcaaccatattaatgtgccacatggcaccacatatggtgtcacatgacacaatgttttctgtgacatttttaattcttataaaatttaaaaatttggattttttttcctataagggttttacttttcgattttagtcgttataaacttttcattcttcgattttagtccctaaaaatttaaaaattatttttagtcattaattatatagttttgtcttactttagtcatctatagaatatttaagtttttttgtatctaacttcatccaatcaatatcatcacacaatattgttcaaaccactattagtgaataataacaaaggtgcaagtggaaccgcgtgaatcaaacattagcccaacccacttggacgcacccgaaatttttgaacacacctaacttgtaattaacttaaacaaaatccctctaggcccaaaaaagttggaaaattaaaactatttttttaggaatactcatcgattgattatggttagatttgggccaaaaattctaaagggcgacaaactaaatacacttattttaggctcattttttaccaagtgagctttcattttaggtggattactatttaggagtatgcgtgtgtataggtgtaggtatggaatgaactcatcttattaaattttaagtttaaattaacttttgctccttatagaatagggatttagtcccttattatcttttaatttagtccttataaaactttattttttattttagtccctaccactattgaaattataagcgacatggctaacgcctaatagtggtgatatcatgatggcatcaccatcatgttacatcaacaaatggtagtgttatcacttgatggtgtcataaaaaaattgtcatcagcaaatgattatgtcatcaaaagtgcaacatcatcatgatgacaccattagggactaatataaataaaaaaatacatattttcaagcactataagaaaccaacttatttgcatgtaccaaaaacaaaaaaaaatggtacaaagactaaagtaaaaaatgacatatttacaaaagatatttaaacattaaactaacaattaattgatagccaagattgataaccaatattcaacaacaaaaatttgataattattggtcaacaattgatagtaatggttgatagagtaatctaggatttgaaattcaaggcaaaagacattttgataatgggattcaaggattcaaatgcaagatttaaggattaattagccttttatagaacactagtgtgggcatagcacacatagacctaaggtggcctaaaaccatgatcaatctagaagaagtcaaagtggaaagcaaagcctggatataaaatgcaaatgcaagtagtttttcaagtaaatctgctatagtgccatgatctcctaaaaacaagagtagtgagttattatcatatgaaacataattgatgtcaattgtacgatgtagtcaaggtccctaatcaaatcaaccaaatatatcttttttgaaattagttatatttatttattaatcaaatttagcttaatgcttaaatatctttttgtatatatgtcactttttgttctagttacagttttttgttttagtccttttaaatatgttacttttttatttttgaaattgtcattctttttttattttagtctatgatgatatcaccataatgatgtgacatttttttatgatgttatcatttgccaattgagcttttattatgatatcatcaagtgatgaattcatcatgatgtcatgatgacataattattgttagtcatgcccgcctttaatggaatccactaatgacaggaactaaaaccaaaattttacaaggactaaattcaaaaagaaaactaacatactaaaatgaaaaaatttcttattttatagggaccaaattcttatttaagactgaattttatggttaaattcctaactctaaactctcaacattacctgattatttatcatacgttttgcatatgctttcttcggtccttaatataggacacttttaacagaattacataaaccaataaaattaggtaaattgttttttttaaaaaaaaaaatagacttgaatatgttttaggtccctgataaattatgtaattttgttttggatccctaataatataaattgttgtgttggatacttgatatatcaaaaattttgttgagtccttatcattagttaagtgatgacatttcaccttgagagcacatcttgcaaatatattgttgaggtaaaacccatcatgacatgaatgttttaatgacaacaaacttataaggagcagtttttaagtgggttattgctactaatggtttgccttgaagtatttcaaataaataggacttttcaagaagcatggagaataaggtgtgaagcatttgcctacaaccttgatttcccaaatctgaagtttgtccaacttcagaagtaggaaatcaaaagcacaaaggcagtcacattttctatatcaaagtgaagatatcaaaagttgtatatgactagaagcatgcctataaaggcaatttaagtcaaaaggtagatatcaaaagctacacgtgacttaaaggtcatcagaagatgcattttttagacaacacgtgaagacatacgtgtctacatagttgagaagcagtgtaatgatgcactaccttgacgaatctctcttgatccaacggataaattcataagaagagagaggtaagtcctaatttatcaaggcaaccatgaagagaaaattagtcatcacaatataaaatagtcgaaaaaaaactacaaccattctgtagaagactcacttttttaagaaagtagcaaacgtcatggttgagctagaataaaggagaagacatgagttatgaagcaacaacatgcactaacaaacaaaattcaaaaaattgaagtagtatgtaagttgttccagctaaggaaggaggagtacccagttgtgtgatggagacaattcacaacatatctccttggcctccaagtttcttgagtttaggagtaacgaacctccttggcctttaagacaagatgcaacgatcgtcttcaaggaagtttgtataattatattgaagagtaacaggagttctttgctatcaaggaaacaacttagagagtttcataggtcaaaagcattatcaacttttgatactaaacttacttagtcctggctctcttgatttgtagtgtcaaatctatctagctatagagattttgtaaaatcttctcaatgggagcttactgatgagtttttccttgtaagatgtattaggtatttgtccaaatagaacctgtttaggataatgaacctcagaaaagtaattaggtgattgttatttttgaagattgtgcgtgaccataactcgttgttgtgtgggtcaagtagcaattgctacaaagggttcgaagcctagagaggcttttcaaaataatacttatgtacatagctgacaaagtcttaaagaatattgaggtgcaagaacctggggaggtttcaggaaagaaaaaatgtccaattggtgcttgtgttagcggaaagcctacagttgtagggactgaacatagcccagatggggggtaaaccatgataattcctttatgtgctttactcttcttattgcttttaatctatttgtttttttgaattatttacttaagcaactttgttttaaattattatatctttgatataaaatacttttaagcatgctaaactattttaaatatccagaagcatacacctactcatcattctttaactcttaaaccagattcttcctaccctgaatatgatattttatgagtagcttctaaagtagtatatgaaagtatttttgtatgattattattgaaaatctattatatacaaaatactatcaaagataaatgtttttttctctcagttaagcttcttgaattttgtactctagtatatcatataactttagaagctaagtgttttttttgtagtaaaagtcataatcgactaagtgttactattcaacttccccttatggtgacctttcaatccacttcatacatatcaattatcgagatgatgtcacgccatcacttaattgacgatagaaactcaaaacaaaagtttaaaatatcaatgatccaatgaaacaaaaatattataaaaaaaacaaaaatatttagagtatttaataagaacaaataaatgaaaaaaaataagtttttcataaaaaaaatgtaaaatgtcttaaaaaacattatcatttttttacatttttttaaaaatagtgtcttacatataaagacaaaagggagtattttttttcttttatttgttattaagatgcagaatagaagctatccatactcattgattctaaatgaacaaaccaactaaaccataagtgattatttaatcaaatactataattaaattaatagtttttagggtgaatatatttaaatattaaaaaaattaacatactaatccataaaaaaaataatccaacaaaataattttcgtaaaataggtatttatacataattctcacaaatgcacactctttgaacgcccactaattacccggaggatctacgtgtctttggaagtgtgcacctctttctttcatcaagtagcaagccaccgttgcaatagtagaaatgccaactaattgagcagtgacccaaaatcagattttggcttacgttcacgcactttatcacaaatattaattacagggtacttgcatttgttgacggcttgaaatgataaatatcgtaaaaatcaaaccccaagattttttgtcgatattagtcaattttactagttgagccaaatcattgttggttacactaaccagttaatactgataagaaaaaaaaatgcagaaaattagttgaaacttgaaaatggtatttaacaaaattatcttcttttttaatgaaattcaaaaaattattaaaaatatataaaaacactcatataaggattccaagaaaatatatattatttttgcaatttttgttgacttttttatttcacaaaatatataatttagtaatatatattaatttaaattttttacaagttttttttttataatttttctattttatatattacttaaaataatattaaaaatataaattttattttaccatttagtgctgtctagagttcaatcaaaatgaacttattaattagtttcaatctcaactattaatttttaatttaacattggttattattatactttatcctctaaagtacactccccacgctacacaccaagaaaaataaaccaaacaaaattaaagaattttgtattaccacgcaagcccacaaggagcaatttcaaattcaaagttacttttaaccattagaggaaagaacagccaaacacgaacatatagtaagttagttttttccgatataataatttatttaaaaataaaaagcttattttaacaaaatagattgagagtatgtttaggtgaaaaaagaaacaaacaaacaaacatctacaaataattttctgcaaagtgctaattatatgtgagtcctagctagcttccgcgtattcttttattcgttgtaaccaccgtaaccttccacatattcattttgataacttccaatagataaaaactaactaataagataaatttattgtaataagataaaaaaaatagtattggaaggtaaaaagttactaactaaggaatgtatatgattaaaatttttatacaataagattcatataaataagtttcatagaagcccttctaaaaattctttaagacctaatttggtatttaattattagttaaatataaaatgtaaatttataatgtttctatgatttattaacataaatatactatttgttttaattttaaatactattaaaagttatatccattttaacaatacaacatatttgaatggcgaaaacgagagttatgaagaaaaaaatagactgaaagattactataattttctagaagaaaaattgaagaaaaagtaaggacaaaaaacatctaaaatcaaaattttaattattttttaaaattttattcattttaatttcttttttaaaatttcttatattacattttcttcttttttctattttcttaaataaacaatgagttaatttaaacctttttttagtaaagttaatttagacttttaaaacaaactttctaagtgtcttttttttcaaaatgtctcaggctacgtcaaaaaaaggagctatattaagaagtaggaaaaatttcaggcaacattgggaaaaataggcttgaacctatttagggaaagtttggtcaacctagcacattcgtacaatgagagttaattatcttagagatgagaataaaagtttaaaagtaacttgttctgttgggtctacacatgcgctccatttcatccattaatttattacctattcggaaatactacattacgtgaccatctttacttcgcatgagcaatatataagagatgtcttgaagtatatttttacacttcatttggaaatattatgatcagaaatgtaattattaagtaaatttataaaatgattggttacatgcaattcaatatttgtggaaataatttttaatatttaaatgatatgtgaaaattaataaactattacctctgatcctatttataagcaactaattaatatagtgtatttttacactatactgattgattattaaaggacccaatatattatttatgaagatataaccacattgtaaaagtaactatcaaaattcttagaagagtataatatttctactacttctcactgtcagaataaaaattaaataaaacataaaaataccactttcttgacgatcaacagccagccaataatggtcaaaaatattttttttatactaaatatgtatgggaatgtcacatttccagtatatttttttctgaaataacttttcaaacctggaaaaataatcacaacctttactttctccttttgttcttttaactaaatcatgctgtatttttctattcttttttttggcaagaagaatcacttggaggatcgataagcccttctattcgagaatttaacatttgttaatgacacgcaaaagggctcataatgttttggataagaatgtggtaataacattgcactaattgagttcattaagaataaatcatgaaccaaaaaggttttggataagaagagaaacgcatcatacacatatctaaaatgcattagggtgcatatcagatgatatatttaaatataagataacaccatatagatatgggaccacttagcaatagaaacaaatgcaatgaagcatgaaagatagccaagataaatgagatattttataaacaaaaagcctaaaactaatgataaatttataggtgattaataattatagtggataagatcacatgttaattatagcaacggtgaactctcacttttggtcaggaatataaaatttattgccatttagattcttgaaagtatgaaaatgtcatataggtttctaaacgtgcaatttttctgtcattttagtcttgccactaaaaaactttcgtgtaaatgatatctgataatttgatatatattaacaattggtaatgtatagataatataattaaagatcaaaataacagtaattgaactatcatttgtcatccattatacattgccaactgacaatatacacgaaattgtcacatgttatatatcattgcaccatcaaccatcatatagatggacaatatgtctcataaatacgaatgttaattttaatgaaagtttttttttttttaacagcaggactatagtgaaaggggattacactttcagtgtcagattggtagtttttacccttatggcaatggcccgggccaccattgatttgcccaacaaatgttgaacagtgaatacaattataagagaaaaagatggcaaaagaaaggtccacattgtaggcgaagtcgttttgaggcatcactgcttacaactaatgtcacatgaatgctctatttcgataaaattaaattaaaaaaaaatagaggagtagaaaaaagataaaataatataataaatatatgtataattttaatatagagaaatttaaagagaaggaaataaaaagattattctttatttattttgtttattaaccatcactgtataatcactcggctcttcacctctcgccaatagtatattttgcgttttatttattaagatgatggtaagaataagtgaaaataaacacagaaattgtatgcattttttatactgattaaaattttaatttttttactattttttaacataaaattatctatttatttatgttacaaaaaactgattccttttaaaaaataaaaataaaaagtatacttccctttcatactttcctccccattaaggaaggaatattttttagtctcacaagattttttcctcctttattcccattattcatttctatgtctatgtcaatattaatagactttaatgttattgacgtatgaaatagttttatatcattaattgataataaattattattataataattttaaaaataattattataaaaattaataaatttattgtacatgtggtgatttgtaatttatttaatttatactatatacataagaaaatttttaacagaggaatgcttacatgtgacttctaaagagttctacaaattaactgatttgaattaaaaaaagaaaaacatacactttacattctcgtaagctccataaaataaattgatttgaaatgttcacctaaaaaggttaaatctaaatattttaatctaatttagaatataattaatattattttatatatttaaattaatatgtaattaaaaatttatattcctatgatttttacaatcaattgtttttacttataattccattttgaattaatattatgatttagacagtataaatattttcttaaaagaatataattctatatttttattgcactaaacttttttctatattaaattaaattatattaatattaattaatttgaactcaatatttgaattatactacatttatcaaaattattttaagttaaggcatattaatgttaattaattaactgaaataatttaggataataaattatgttaattgcaagtttttagggtatataattccatattgtatcatgttaaaattggattttaaaatggacaataatttattgcaatttcaaggacaataaatgagatttcaaattattaccataaatatataaaagtttattaaactatttccaaattgaattttattatgacatgatatgattttggtaatatgatatgatttttttcttccaactttcattctacatcttctttcattcattaaaaatggatacatattctttctttttttagtcatgattcgagtttctagagcaagctctttgagaatagtattcgttttacatttttcagatttttttttactgtaattttacagaaaatttatgttctatgttttaaatacaatgccgtcattttttcccctctaaccttcattatatattttctttcttccattaaaaatctatacatatttacttattatctttttttagccatgttttgagtttctatagcgacctctttgagaagaaaagttagtatttgttctacattttacaaaataatatgttatatttcctatgatttctattcctaattttctctcatttttgtagatactattgtgtgataataagttaaggatatgtttaacaaaattaattcgaagctgaaaatttagttaatagctgaaaaattatatcattaaatcataattctttggtaaaattatttgttgaagtagttaaaaatgtaaaattatatgtatatatatatatatatatacaaattggaaaagttttaaaatatgaaatgagaaaaaatgattttaaccatcaaattataattaaaaagaatcaagggctgagattaaaaacctatctgtctttgattctttttaattataatctaacacttaaaatcattttttctcatttgtcaatttaaaatttttctcatttggaatatatatatatatatatatatatatataaaatttgccttaattaaaaagatttaaaagtaaatctataaatgttcaatgataaaaaagaattaaatataaaaatagaaactagtatttaaaaaaatattaataccaataatattttaaaaaatattaaaaactactaaaaaaacttgtttatcaaaccgtcaataatttttcatctaataaaaaaagataaaaattaatttaaatgttttgtcaaacacactcttaagacttcttgatgagcaaaatgataatttctacccttctatttgtttttcattaatcttccattctattcatacatgatatattattgcatgtattgttcatgaagaattcttacttttattatcctattattgtaaatttcaggtaacttgtgagcagaatatgtattgcttatgaatctcatttgaagaaagcaactatggattcaggcttgtgagtctcgacccaacaagagttcaggaattggaagtaaagatataataaagtgaaacacatacgaatttcatagatgcatttgtaatgaaaaaattggaatatatgtttctaactttttttagggaatatagtttatacgattctatctctctaatttcaaatcgtttttgtttttaattcattgttaaaatatttaaatataaatctttatatttattattaatttgacttcgttattagttgtgttgtaattatttttcaaaggaattgactattttattcgtttagtactaaaaaaacaccttaattatttataattatttttttcatcgaaatgcatgtaattttttattattttatgtataaaaatacattattatattatttttattgaacttgcattcttatattagttaatttaattatgagcaatattttatgatttcatttaatttagatcattatgaccattatatatcaattggaagtacgaagaaatattagtacgaaatgcacgaactgacatgacttatgtaaatgtccagtaattttggcttttttcacgggctcccttctcacagttttattttattgggttgtggtcgctgtggcttcactttacttcttctttacaatctttaactagtattccgcacgggtcgtggttaagctcctacatttttataaattaattttaatttttatatttatcataaaaaaaaatatttatatatgataatattgataaaataaattaacataattaattatatttttcttataactaataattaaattattattttacaataaatataataactaaaatgttattatgttggttatcgtaacaattaaattaaataaaagagtttaaaattttcaaattttgattaaatttaaataataaaactataatttttttaatttatcaaaatttcaccatttcattttacttttatttacccattatttaatatgacaaaaatttaaaaatgaatgatatatttaataaaattaaatattgtaaattatttgacatgtaaatgtgtaaaatactatataaaaaaacatttttccatgacggtttactcatgatgacatagagaataattgtctttcatacatgataattgtaatttcaaacattaacaaataaaattaaaacaaatttacattatgatatagtgaataagtaattaaaagttgtcttataacaaaaatcatttttataatgaattattattttgatttctatcataaatattttttatttacgatattattaataaagtaatttaaattaattaactttagttgtcttataacaaagaatcaaactattaatctttaataaatatattaaataatatcattatcttattatcataaaaaaagaattaaataaaaaagtttaaaaattttaaatattcatttaatttaaatgataaaactaaaatattttgttttaaatgtcaaaatttaattttactattatttacacatttttcatatgttgaaatattaaaaacaaataatagatttaataaaaataaatacagttgattgtttgatatataaatgtgttaaaaaattttaataaaaaaatattctcataacgttaactcataatgacatatagaataattattttccgtaaatcataatcatagtttctatcattaaaaaatgaatttaaaactaatttccattataatatagtgagtaagtaatttaaaaccatttcgtaacaaaatcacttttacaacttaattttagtttttatcgatataataattaatgataattttactaatgattgttgattatttgatatgtgactatgttaaatactttttgggaaaaaaaaatttccatgatagttgacccatgatgacatagagaataattaatgttggtaaatgataattgtaatttctatcataagaaaatgaaattaaaattaatttacattatgatatagttaataagtaatttaaagttttcttgtaacaaaaattatttttataaattaatttattttttatctctatcataactaaaaatatttttatttatgatattattcataaagtaatttaaattaattaattttgcttgtcttataacaaagaaacaaataattatatattactatgctggttataataacaaatatgttttttatttcttaaatatgatgtatgatctttttagtatctcaaattttaaattatttttatttcttaaaattgataattatttttttagtatttcatcacatatgacattaatataatatttttttgtagtccttatataatttctagggactaaaaataataattttaaagtaacaatatttgtaaagcttttccactgtcacattatttggtttaaaaaaatatgattcacagatactaacttaccggtgaatgaatgaagttatgatatcataaatgagaaaaataatgaagaatttatataagattgctatttactatataggcagccccaatgatcataaaaacatgattggaatagtattataaataataaataaagtatgaatctctataatattaaatcaagtttatttggcatgattggaatttatccgatcactggccttgatagaggttcaaaacaaaaaataaatacacaaaaaataacatgaaatgcagatgctacatcctttatcacgcagaagttacatatgacagattccaaaacaccctggatttcaaaatttgagttggatccaattagcctaaatcagaatgtccacaataaaaggtcaatcactataaaataatagtatttgtgatattattgatttggttcattaaaataattaactttgatggtgttataacaaagaatcaaactattatttaataataaaaatattaaatagatgttattatgttgcttccatacgctccgcatttttttaaaataattttaattttatatatatgataaataaaataatagtatttgtgatattattaatttggttcattaaaacaattaactttgataatgttataacaaagaatcaaactattatttaataataaaaatattaaatagatgttattatgctcctccgctactctccgtattttttaaaaatgattttaattttatatatatgataaataaaataatagtatttgtgatattattgatttagttaattaaaataattaactttgatggtgttatcataaagaatcaaactattatttaataataaatatattaaatagatatgttgctccggtacactccacattttttaaaatgattttaatttcatatatatgataaataaaataatagtatttgtgatattattaattgcttcattaaaatgattaactttgatggtattataacaaagaatcaaattatctatactataataaatatattaaatagatgttattatgttactccgctactctccgcatcttttggtcattaaaacttttaagcttttaagtcagacataaaatattaattacttttggtcattaaaactttattttagtccctataagtttaatttttttatttgctctcttataaaaaaatcatttgttattagtccctttgaaaaaatttaccaaagaacaaatacaaaattcgagtatttattagaaatcgaaaacatattttagccaattaagaaaaataaaacaatttcaagattggccagaaaagggtgaagctgtttcttggtacaaaatttgtagctttcgtttgccaagtcaaaacctgactcaacagaacaaaatgatagtgctcaatagcttagaatatctcaatagctttgcatctctatcatatgataggagctcaatcaaataaagttatccgtatgtcccaataaactgattcatgattgatggaatgttaataggaaaaagaaatcgaagcctctgataagaaatcgaagtttctaattggtctatacagttattacagttaaatgatttggcgtaaccaagatacattgtgcaagtacaaggttgtaggatatgacgatcctttgcatttggacaattcacaattgctatcaactcagtttttgtttcggaactttttagaggatcatttatattaggaatcagtaatactttgtcatgtgatataatgtcacaatatcaataatataattaaatgttccttgaaaatccttggcaattcgtttagttcttgcctacaagaaatcggaaatggaaatggttttagtagacacgctttttagttccaaaatgcatcatcactctgctaagatcagctgcttttaagattagaaaaaaaaaaaaaaaaaaaactaagaagattgaggttttctcatgaggaactttgtttatcttgaaggaccaattaatatagagtataaattcattttcatgacttgtagaacatacttggtttggttacttaagatttgttgtggtgtggagcattgattcttttctgtccatgattctacaatataaactctgatttaccctgttatgactgacaacattaacatagagcctcatgaaaataactcaaattttattataagccatacatatttggtttcaaagtagactatataggctgagtttagagaacatcaaaatataatgtaatgcataggggccctaaaataatgccagacttgctcacatgctcgcaagttcttttttaagacccaggaagctttatccttaaattgaggcaagagatggcaaatagcctataggctgtagcagctcaagtatgaagtatctagctaccatcgttcagatttcatttttcatcttcatatggtctttgggcacttgacatgatgaaaatctcaacagattacagaaattaccatatgagcaggctccacaatttcatacccagttgtatgcttaaacatctccacaaattcatctgacattcaaaaccagataacttttagacataaagccatgaacaaccttcctggctggacagtgctagtaaactcagctgtgaaagtaaaaacctacatgttaagtttgaagtaaaatacaagatatggctagaaaattaagtatagagagcacttcgaattgcagtgatgtgagatatcagagatgtgtgtacttatgattgcagaggataaataagcaattaatgttacatttgacaatatttcaacaaacaactactattgtgaaatgggccatccccttgcatgccttattaattccatatttccaatgaaaagtctttgtttccttgacctacgtaaacatctaatcaaacaatgcaacctgtgaggctattactcctaatctatgcattgtaggctaattaataacatactctggtctgtttttttaaactacttcgaaagctttgaagtctataatttaatttttctttgtcagtactaaaaccttagggtctagctaatcacaacaaatgtgtatttatgagattctttttaatgaaaactttcaaattttcatttcgtaacctttggtctgaagcttaggagtgaagaatccaaacctgggagaagtcaagaagaagctgcggatgctgcgaagcaaggagaagcaacaaaccaacattgtttcattttataattttgctaaaacagaggtcagaaaaattcccaatgaaactgataagagtgtaaatgttgaacataaagcagaaccatgaaacattaaaaaattgaaagttaaaatattaaaaacaaaaaagataaaaggaaatacaaagtatgagctatacaccacaagaagtccaatattcctttgtcttgaaacatcaaaaaacactaacatgtggtctgagaaacatgattaggtaaaagctgaggttatgctaaccttctaggttatgctaatgccacagccagacgaatggcaccaggtgcaaggattgcaacctacaaagtgtgttgggttggtggctacttcagttcatatattgtgtctgctattgataaagctgtggctaatagagtgaatgttcttcccatctctttaggagtgcctgtagcctgcaaggtttggcatcttcaacggtaagacttacaactgttacaagtggattaaggataaatgataaatacactacaccactctcggtaacaaagttacaatataaatataaaaacttccgtattacctccctgttgcctctgaccaatataaaataatccatattaactccctgttgcctctgaccacctctataaattgcatattactttagtttgataagctgataaaaaccaaaaattgaaacaacttagcacattgaacttaaagatcataaagatagcttagtaagagtgaaacacatatggacttattggcctacaactactgtcctcctgtaaaaacacatttagaggtcagaatccaggtactgaagttataaatctataatatatatagcacttgaaacagaacagggatcactttgtacatttacatcagaatccatacattctattttctctaaaattctctaatttctaacaaccaaatgaggataacaaaaggatgacataaagcaactaatagaagcatcctcagcttctatgaatataacaaacaggtttaagtctaatatgaggtataaagattttgagaacatatccaaatcattcaatcaaggctaatatgaggttgaaaacagaaaaatacacagtcacagatcttacctcagagccttttgtagtggactgtggtagctactctgtggagatgaaagaaggagatttcattttgctattgctaagcaaaataacagcaactaaagtgatagataatacgataagcacagcacaacaaagcttgccttaaattaagttaattattctgaagcaaaagacaaaaatcgaaacaacttagcaaatcacacagtaaagatcatcaagacagattagttaaagtttaactttaatggacttattggcctacaactattgtcctcctgcaaaaacacatttacagctcacaaatcttacctcatagcctttggtagtgtactatgctaactactctgtaaaaacacattgttacctcagatcttacctcacaatcttgttccatctgattctggagttcctcaccctgttgaaaaaattaagttattatagcaatagacaaaagtttcatttagccttaggttaattgggatagactttcataccaaatcttcatcaatgtcaacatcctgaagttcctcctaatcctaatcaaataaaagcaaatgaagtcatagataataagagaagcacaatgcatgcaaataagatgcctattagacaaaatgcacatcctaatcctaatctttatttgccttgtgaatgtggcgaatctttattttttagactatttaatatatttattattaaataatagtaactcatgtataaagcttaaaatgttaatatccaagaagcatggttattgcaatatacaataaagattataaacaaaacaatagaaatttggatgagacattttgtcaaacacttcataaacaaaacacattttgccaaacacctcataaatttcagaaactgaaagataagagagtgaacatgaattcacaattaaaatagaaaactaaaattctaagcacaagctatataggaacattgaattgatcaagatttaagctgtcaatggagatcttcattaaaggaatcaagcaagaacacagggaaaggaaaaaggaagtagaaaaaatagagataaaataattatgaaaattaagaagagtgtaaaaaagtgtttccaaattactaaatctgttttataactgtactgttaatatgtaatttatttaaaaatatacaagtaaattaaaactatagaaaatgataaggtcagattattaaatacggattacacaataaacaaattacactatactgttgatttattgaatagagttcaaagaatatcagaccatattacacaactcacttgtctctcctttaactcctcaggagtaaaatctccaaggccagccttattattttattcaacacatatgaaaatgtaggatactatggtgattaggtactcattaagcaaccagagttcaaggcaaatgctttaaataaagagaaatatatacctagtcaatccagctagctttgtacgaaagtcattgaattctctagatggatcgtcagcacttaggaacggctgtagttccctttctgcgcattgatgaagtctctccagaccagattctgcttcacctgaaaacaaattatagttgagtattatttacagagaaatcaccaaaaaaaattataactaaaattcaacttgaaaaataaaccttgtaagtactcaaagaactgtttttttgcatgctcatgctccggcaaatagaacccatatgcatatgtccatttcagcactcttctacactcaattatctgaaaacatgaaagactggttaggaagccatctatttcaccctgaaatgaattttatgcaattggggctgctgtcattgaaattccctacagctatataatagcaaagaaaaacacaataagattgctggcactaaagaaatttattcttatccatcacaataatttgtatatatatgaattaagaggttttcatatatgctcatcaattatataccacacaaatgagtatcatgaaaaccaacatataacttttttttacattaagtaagaccatgaaaattttagaagtaggtacctgcattgtttccaaagcatctgtctcggagttgaagtcataaaaggtacttgctgcagtaagcttcaaagaaaggaactgcaaaaagccaaaagtgaattggtattaatatcaataaggatatgttaaaagtatttttcctaacaaaaaaaatgaatattatcttcttccactctcagaaactacaggagttgagttagctgaacttgtctcaggaagatccattgatttcctcttttcaccttcattgatttcctcttttaacatataaagcataaaccactaaaattagccagttagcagtctttccccttgtattgtgttgacagagatcattctttaaaagtggtgactttaaggttaccaataaaatgacaatttccatcccattaagcaaaattggtatattggattgacgaaaagacatgcaaatgtctaaatgacactccttggtgcttccaactccaaccatgtctttatttataaattgaatttttgtctgaagctttgcttatttgactatgtgaactaaagtactaaactcagtccaaaacagccaactaaaattcccatgcttgggtctatagaaactctaacctcttgcccctcaacaacattagttgagagtagagtcccagctttcacttttattttaatctttttgttaagtttgtttttatttcaaataagttagttttctcacaagtgaataaaggaaaaaaaaaaacatgggattttggtattgcattttacaagctttgaattaaaaaaaaaattatgttaatatgtctttatcccaattgctctttatcagcttcaaaggaagccggaagagaagctagcaatataaaagtaggcaaaggaaagaaaaccaagttttagataaggcaatgaatggttaatgatgttaatttaaaatattgtttattaaagacattattccttttttatatataaggctctctagatatcaggactgacaagaacaaattgatagaacaaaaacatcacttttctttaaaacctttaagctattaagccacccaactgataaccttttattaatagaacaatagacctcatccaaaaaggctagcacctggcaaattatacaagagacctgaacaatggaaatgagatgactgcatttcactttccaacacccaagttaaggcaaatcatataaaaccaaaacaataaatctcttcaagaaagcaattccctaaatgcaactcatctgtttgcaaaacaatccactcaattagtattataaagttcaaacttccttacctcaatttgttcagtcttttcctcagccataatcttgtcaaattcctcccttgaaataagttttcctttctgatcgtataaagaaaagaagttcagaaattgtggcagatataaaataatcataatttttattaagaatttggtcttgccattatgtaagtcataaaattgaaaatttcaacaatcagtgacaaaggagaaaacatcatatatttgagaacaaaatttggccactgtaatgataaagttatgaggtggattaaaataaatcatgtgagcaaatatcctaaacatgcatatatctcactctattttaaaatacattttaatacatattctaaacacattttataatgtaatgcatttgaagtactaacatataactaacagataatatacttgttcttttatcttcataatattaatctaatcaaattcattacatgcttatgaagatgctaaaaacccagaagtgtgccaaatgaaatctaataaatgttcacatggcctgatcacttactgcaaaccaagtgcacaaccacatattgttaaacaacatttcaagaagcaaccgtgaagccaagatgcatattagcacaagccataacttctgtttgaccgattccctttatgaatgtctgagccatctttgccacctatgaaaacagattaagaattataaatgtacattctctttcaaaaatgctaatgaaaagaacagtttcaataagggtgaggcattttttcaaacacttcatattcacccaataagttgctacatgtttgtgtgaaattaataaatacagcaaaaaaaatatgcagtgtgaaggaaagctaacagcacaaaaataagaaagagcaagagaatacataatagaaacccgccaagattaaaaaaggaaaaaggtatacagccaaatcctgagataacaggataatggcatttaggaattcataatagaacagacttcgtgatagttatatatatatttttttaaacaatgtggttactaataagaaattgacttttgtggcacactcaaaaataaaagtgaggttactgtaacatttgttaggcctagtacaaaaaagatatataaagaaattaccattaacttgtctacgaattgcaccttgtgccttcttattcgtaatttttactgcctcagctgcaaccataaaagtttgttaattattaattaataatgaaaaacatatgaagatagtgtctggtacaaaagaaaatgttgggtagctttcctcctagaacaatcatgcatatggtgtgcaactttgcataaagacaggtaatgaagtattgaacaacataatctctatgtctatgttgttatacgccagtcaccaggaagagacttttatcacataacttatggtacctttaaattttctttagctgtctttcttttcctttctgcctttgtaagctctgtttcttccttaatatcacccttgccatcaaatacctcctcaggagccaacatagcagcatctgaaacagccacaggttacccacggaaggcataatacattgtcagtatatgataaatggaagaagcagaaacataaatttgctttaaaaaaaaaatacctctttacttcttccattgccagagcaggcacattagcttgaatagacatgtcctctataacctgttcagttcaattcaaggcaaataagaagacaaatttcaagtgtcaagtatattgtctatcaaaagagataataagaatgttgatgtcatacaggttttggagcaaataacataatatccaactctactgtaacataggcctaattagtaaagcaacataggcctaaataatctaaaaaaatgattcaactctcctgtaacataacataatatgcaaacaataaaaaaatgcaaataaatgatggtatatcattgcaagacgattgacatgaacttaataacagtataatcagaaatagttaaaagaacagcacctggggtatagcacaaaagcaaaatataggcaggtcacgtaaagcagccatgtattttaagcaatcttcagcatgcatcacagcattagtgaccatgtcatttaagcattgcactgccttaacagagttctcctcatatttcaaatcctgaatcataaaaaataaattggagtaaaaaagaagaaaatcatacttgagcacacctggacacaaaaaaaattacaaagtattcatgtgtgtaaaaaaagtgtgatgggtttcactatcacaccatcaaatattcaaattcactaaaaaaatttaattcctctctcaatatcccccatgcaaacatactattaagctatctaggaaaatttaaaaacgaaattgagtgaaactaaaaaagaaaatgggtaaaaacgtggcatataataaaggcagcgaagatgagtatatccagcaccggtgaagcagagggcagaaggtgtatcagttgcaaggaaagtgaggtccaaaacgaaaatgaaacagagaaccatgagtatatctccaaatcaagaaaatagcgaaacataaaacctgtgtgaaaaaggcacaaatgaagctgagaaaagaagcaagcggaggtagtgaggtagagctgaaaacggaggaaagagaggaagagagatttaaataaaatttgaaatttgaatttcaaattgtaaagaagtgtgcattttgaaatttgaattagcttcactgcgtgtgaattttgccgctgctgtggatttagcttccggtggtggttcggtgtgtgaatgaagaagaaaagaaagagtgtgatagctttgtggtttggatgaagaagctgagacagtgtgctagcaggacaaacggagaagaaagataagagaaaaaagaaaaagagaggaggagatggaggaagagaaagagacaaacgaaggagatggatttggtggagaagagaaagagggagagacagagcggaagcactgagctagccagttttcatttgaatttgaaattcaaatataattttcaaatttcaaattggccagcttctgcaccgtaaaagccaagcgtgagaatagcctgaggaaaagaaaaaacaagacagcggaggaaagctgaggctgagggttaatgagaggctgccacatcagatttggatggctgagaaggtgacacgtggcaaaaaaaaccttatttttattctagtagtagattataaattgaaaatccaatttcacaatgagatatctcttcactctccctataccattttatgtcggttttttcttcaacctagttaaacccaatttcattcaataagaaattgaaaacccctattgtacattgatttctttgaaacttgtgtggtacgagccctacagtaacagaatgagtttcaggtcgtggcttcccctaattggatgacattcaatgaaaaattaagggactgcgtacaagttgttagcttatgtctccaattcttcatgctttgaaatcaataattttaggtgttggtgcgagaactttgcatgataagagggatagtattacagttctgttctttttattttattttcttttaaattaaatttgatttattatttaaaataataacacgtcagctcttcgtgcatttcgtaaggttattctttgtacaatatagcaccgctcatcaattttaattaaggcattaagcattacccacaattatggatatgatatagttagttatccataaatttcaactagtttgagttcaaagtatgaaggtcttttgttagggaaaaagttttttcatgtcttgaaatcatgaatttgataattatattttttgaaaatgagtaaaacatgtctggttgattatgagaaagatttagataaatttcttaagaattaaagaaatatataataattttatcaattattttaattatttactcacattaataaaagtaatatgacattggcagtaaaaaaaattaaactcaaaaaagtaattaagattctcacctaatggcagttccgtgaagagtttcttcacgtgaagaaacgaatgcttgaagaatttatgcattggagacaatccacgtggaagcaacggttccttaaaaatgaaatgagtttcttatataagaaacggatgcttagaataaaaattattatctaacatcaaccaccttcaatctatccatgtacaaaaaagagggaaaataactgcaagaacaagaaaaatggacagatctagaaaaatatcaaaggggaaaggaatattgaacaaatttgaaaaaaaattaatgtcaccgcaccaatgtggttgcacgagggagtggcggcagtggctcatggactggcgggttgtgcgagcggcagtggtggctcgagagttgtcgtggttgtgagagagtgtcactggtgactcaacgggcgacgatgttggtggcttctggagaagaaaatggaaagaaaagaaataatgagagaaaagaaagaatgaagctcctggagtttagaagaagaatgattatttttagttaaaaaaacacagtgaaacttctagagcttgtggaaagcagcgaaggagaaggaagatatgtttaaccaaaataatattatttaatgatagtggggtgggaggaacggtggggttaagaatttttttaaattgttaataaattttattgtttgtatctatataatatttttagtcataattttttcttatttttatcaagacttaatcttttttattctctttaaaatagatcttaatcaatataattatttacaaaatattctcattatgaaaataaaataggattaaaaatagcgttacaatacatgttattgtgtttaattatttattattatataaaattttattttatattattactcacttcattttatttattttaatttatatttatgaaaattgaaaaaatgttaagttttattaaaaaaatataaatatgtgaatttttttgagttccttatggtttcttgcattggagcaaaatattgagtgagttccttaagagtgacatggcgctgtagggaccacaaaaaatactgcgggagccacaaaaagttagttaagaaacccaattgggtttctcccattggagatgctctgagagatttcgtgaaagacttgttaaaaaatattttcagaaaatatcgtttttcagatatcatattttttaaaaacaggtagtaaacattaaaaaaaattacttatcccattattaatccttttgtagcaaatcatttattaaaaaaagtatatatatatatatatatgggtgaactaggggacttgaacccacccatgattgattcacaatccaccgtcttgattcacttggctacatctgccttatactatgtaaaaatgatatatatatatatatatatatatatatatatatatatatatatcaaattctagcctttcgttcgatatcattcttttttcttctaagataaaaaaaatgctaaaaaatagtgaaagaaataaaaagtatatataaatatttataaataaaaagattactaattaaataaataaaagtaaagtcttatccttgcatatataaagaagttatttccggattcaaatccatgattaataaatcaccaaaacacaactttttatcactgtgctaggactcgccctaatagcatgtgctaagcatgagaaacaaaaattcttaacccaaaattttcaagaaactcaaaagttatcccttaccaaacgccttcaaatactcaaccctactcatataataataataataataataataataataataataataataataattattattattattattattattattagattattagagataaatcacctttcttaattaaaaaaacacgttccttgtccttatttgctaagagatcacattccttaatttaacataaaataaaaaagatatgttactcatttactaagggggcatttgtttcacatataacttttttggtctcgagaatattgtccatggaaataaaacatgagaatgtcatttacatgcatttagtaaaagagacaaaatgttatgcactgtataaaaaagttttacacaactattaaatcataattcatcatgtataataaatttgttgacatttaaaataattatcttaaaagtaatttaaatggtgatttatgattgaatgacgatataaaattgttttatactgttaatacatatattaactcttaataaaaatgtgtttagttaactataaaattagttggaaatattttttttatatcccaagaataaccaaaatatatgtttgattaaattatttttcctacgaatataatataattactaaaatattcttataatgttgaagatgcttttttttttcataaaacaaataattttttattataagaccaataaatgacaaacaaattatactaaaaaattatatatctcatgttctcatgataaaacccctatcaatattcctttctattgggaaaaagatattaatttcctcttccaggacatgttatgaatggtcttgtacaagcaaatacttcatgcacaaataataattatacaagaaacacaacacaatttttaatgtggaaaacattctcaatgcaagaaataaaaaccacgggaccgatctcggagttcactcaaattcttcactatcaataaagtgagattacaaaatggttccaacaaccattacaatcaatagacaacttcaacaaaagttgtaccaaaccatcacaagaggcaaacacacaaaataggcttttgtacgaaattaatttctacctcaagaaacgacaacaaacaaatcccaacggtaaagctgatgtattgcaagagaggaacacactgattaaatttaaagacaatccaacggttgagcaaagagataaccatttctcaatatcaccgcccgaaacaagacagaacagagcaagaattctgataatctctattttcagttgaaataatccaaattgtaacagtttaatgaatgatccgaacggtcataatgtagaaacggattttattaaccgctcatcaaagttttaacgcgatccaacggttagtgtgagagaaatgttcctcgcaataacacttcacgcttcagaaaacggtttcagaaccagttcggtttgagaattcttggtgatgctacaagcatctattcaagaaaccaaccgttagatgttaatattggtgagtcatgaacttgctgaaaaagtttcaccaagatgtaacggttaaccatggagatagagaagattgaaggatgacagtttctacccttctccacatgcaaattttggtagtttctttctcctctcttttttctctctcttgtggtttcaaattaaccgctaacatatgaaaagaagtaactgctgacctattaaaataaggaactccaatatttccttattgggttggacttggcttgggattcaagcccaacactttcctattcaacagattataacccaaaatataaatatatctatcttcaccacattagacacgaacggaaaattattatgagtgaaattcatgatattgacagtaaataaaaattggtatatgaacagaaaaatttgagaaatgacaaaaaaattatagaatataatgaatgaatcattaaaaaggggagtttgatagtgaatgtatatttgtatttttactgacaggaaatatttgtctcatgtaaataaatattgcatacccctcgatcaggattaaatgttgattgaaagtgatattattgtttactcagataaaaaaaaatactcaaaattaattatttaattacttcataacaaacacataattattcacacaaaaaacaaacaaacacataattattttttctcctcctatattgttgggattaaaaaatctacccatgaaataaacctcccctaaacaattatgtttttttttttttaaatctttctatagggttttaattgtagtgatattttatgattatgttttacaaagacatgggtatgagcatttagctgcatgtggatagacaagtatcaaaatcaatattacctatactggtatggatttgagcaggaagattttttaaaatgcatgtacgaaaacaaatactatacccaaatcctatacattattatttattatcattcctatatataatcagttatatataaaataagcaataataattaataattgcttttttaagaataattaaaaatgttatacttcataatccattattaaaataaataaaaacgttataagataatgtaacctgattattaccccttgaaagaaaaaaaatggttaaaaaataaaaaattaatttaattataaataattcttatcacatgcaatatttctatatttaaaatattttataaaaatcttttataacaagatttttttttttaaatatccacaaacaatatttatcctgtacttaacacgggttaaacattctaattagttaacaatataaactctaaatataacttattttctcatattaatagctaataaaagaataattgtaattaagagaagaaatagtttttttcaataataattatttcattaaagggaagaaagaagacatggagaagcaaatcaaagatttcaaacccctcttgaggacatatatttgttgctttatattttggagagtaagaagaatgaagaatctgaatatctaattaatataaacaaaattccattgggcttttgagtacttcaacagaagatcatttgattaattcatgatatcctcttaatacaaatatttgaaaggacagacgtgtgatatttgattttatattttgcgctgtatatgttttaatttctatgaattttacatttatatttatattttgaaggaacaacaatctcaacatcttctacttagtggtggctgacgtaggaccttaggaattggattggtattcaaaaatagatttttaagagcaacgtacaatttgtcatcatcacaaggctccattgataaatatacaagactaaacttgaaaatatatctgattattttttcacttttgcttgttccaaccaacatttttcttgtttgattaattaaagcagtggtgggaacatatcatggcatgagtacatctaattcaatagataactataaggactaacttgctgtacataaaaaaaaaaatataaggaattatttttttaattctttatttgttattttctatgttttaaaaaacctaaataatcaagaaaatcccccgaaaattgagtaaattaaatttttatatcttaattttcagcgataacaaacaaagtcttcctacaattacatactaagttgaatacttttattaggtttttaaagtgtgtgtaatgcaaaaagtacattctaagacggttgttacgtaaaaatcatcttagaatgtgactttctaagacgattgtagttaacaatcgtcttagaaagccattttctaagacgattgtcaaccgactttaaaaattttacttattaactacacctataaccacgacggttatccaatcgacgtagaaagggataaagaaccgatgtaaaaagtctattttgtagtagtgacaaactgttgtatttattacttaaatgttaaacaaatttaaataacatattgtgatgatgggtgtgaaattaaggggtctaataggattttaaaaaattattttagtatttttttatggattttaaaattatgtaggaatattataacttattagatttctttacaagatttttatgatagtttatattttaataaatttatttcataataatattttgtaattttgttgtcatccttaaaatatcttaaaagtcttatgaggtgtattggattacaatttcaaagtattttaaaagacaactttttttaataaaaaagtcttttgatatttaattaaaatatttttaaatgatataaaaaagtattgtaatatttaattataatattttcaatagtataaataagttttatggtattcaattaagatttttaaaattatttttaaggatgacaacaaaatccggtgacattctattaagatttttttatattacttatagaagtcttttgctatttaaaaatataaaaatttggatgaattattttttaagaaggatttcattagactttttagtataaaatatctatcaaacaatttcaccaaaatccttgagattttgttagactattttctttcttttttctattagttacctgactttattttctcccatcagatatactatttcctttctttaatattcttcaagatgtgtgtgtcatatatatttcttctattcttttggaataaaaaagtgtcaaatatactcctcctttttgcattttatcatttgttttctaaattaaattaatgtttgtttgatgtactaagggttaatataagagaatataaaactaaaatcaatttagctattaaaagattaaaaaactatattgtttttacttctttttatccaaatctcctcatttcttgttattattttcactaactcttgtaattttgaatgtgtttttaaaaattcacataatcctttcaaatcttattatctacaaagtcttttcaaatccttaaaattcttatgatatagatcaattaaaatttaaattatcataaaagtcttctaaagaaatctaataagtcataatattcttacataatttttaaaatttacaagacttttttatgttaaaataatcttttaaaatattaatccaatgtattcccttacttgaatactacaagacttatttataccatttaaaaatcttgattcactatcacaaaacctttttttttttataaaaaaaacttttaatattctttaaaatcctaatccaatacactatagtatctttatttctattttatatgaaataataatttatgtaaaataataaataaagttaatttaccttttttacgggattagtgtcaacaataaagaagggattttaagaattaaaattaaaaataataataattataacaacaaataaagaagaaattttagggatttcaagcacttccaagattggaaaatatcttggcattcccattattcaagggcgagcaaagcgagttgagttcaagcatgttgagaggagatagttatgagtagattggcttcttggaaagggaagttgttgaataaggctgggaaacgttgttttgccatatatgtctgtcattgcgtcatctccagtttatcctatctagtctctttggttagctcagagtgtttgtcaaggttatagatccttattgtgagcgagaaatagtgtgattagatattaggccttgattcgttgggaatatgttgctaggcctaagcttatgggtgggctggtttgagagaaacctgcaaagtgaaaaatctcttttggtatattttatgctctcacaacaaaccttgggttgaagttatgaagcataaatatttaagggaggataccctattccccttgacatatctcacaatatacaaccaactaaccatccctcatattcctctgggggatttttcgttggcttggaaagggaacacctcagctatttactcagcggattctggtctatgattggatgttccctcaacctcaaggtgatattgattttgtgtggaagaaactctggaaactggctattccagaaaaaaaagtcaagtttttttgtctagcaagggctgcataatgctattccagttaatgagaaaagttttttttgtctcctttcctcttctttgcctcctgcactcggtgctctcactctttggagtctattcccaaaaacatctttattccacttacgaagagcctcttgaagatcatcaatcatgtccctccaatcaatctcttctttccaaaaattcttaagaaaaggtgtaaacttcttatgcatcatccatgaagctacaaatctaaatggtgttcttttgttctcccctcttttataagtcattttaataagaacagctctgtgatatgatttaaaaaaaggcaagtggagcacaagagcattttggaaacgaatccacctatcaagattaatcaaaacacgatccaagcactctaataactcacctcttttccaagtaaaatgggccttggaaacctgcattaataaggtcagtttttgtgatcatctcccagaattcctaagcacctctctaagaaggtttgcctgtacctccactacgatcatgaggctggaggatagtattaaaatctccaatgactgaccaagctcctctgatcaaaccagcaatattaatcagagcctcccacaaaactttgcatatgtcggaatttaggacttccatacacccagtgagataccaactcgcttgtttcctccaaccaaccttcaagtgaacaaattgaaaatcactttgaagaatctccaccttccacaaatcagaatttcacaaacaccaaagccctccagactgaccttgaccatcctgtatgaagtggttattgaatcctagcttaggaataaacatattttttgaatctttataggaatgagtctctaacaagaacattagggaagtctcatattccttagaagtatccttgatgagagaaccaaaaccacgagcacacataccactacaattccaagctagagtattcataaataacttatgaagatgacgtgtccattcaccattttctgcttatatccattgacaaatttgatggcatcttcattcatatgcactggtatcataggcacattcatatgattattcctcaattcatggaatttcaaaagatgtaaactctcatcataaggttgtcacatttttattttcccatctctagtactaataaactttggaattaattcatttctaatttgttctttgtgcttaatcactggttgattatgcttcttaaagctcgactttacccccatgcgcaattcccctcctttggtcccttgtgggttttttcctcctcgagcattttgaaccttcatctgttgggtcacttttggccatgtgtgtaggatgtttaaagacattcactcctttctttgagtagtctttagggtcattctaactattattcactgaattgcccccacgtccataagaagtcgagccattaaccattatcccctcccttcatgagttcctcccttccttcctgactattatcaatattctccacttactataatttttgtaggattttcaataactaccaaggcttcaaatttagacccaatattctcctccttagtaactgacttaccttctatatctttcttaatattctcccccacattgtcctccttcttgattgtgattgattattttctcctactatttcattggaccgacatccgcttgctaaaacggttataaagtcatcattaataccaggatttgtttgctcaataatttgtgtgtcattattgataaaaccttcacgttagcccttactccttattgcaccttcacttgcacaaccacccttattccttgttgcaccgccacctacacagccaccatcttctatacttctttcaccgctacttctccttgtaaatctttcggacattgtagcatcttcgtacaagtatcctttaatttatgtccaaacctttcacatctgaaacaaatgaaatgaaggccctcgtactccaaattaagcttacacccgcaaacataaaaatatgagattcaaggggtttctccatatcaagtttacacaaatccttgcaaattttcctctagaatgaatagatgttaacctatccacttttaggaatttcccaagttgcatgccaatttgctagagaaaaatttcattgtacaactctatcaggaggcattgaattgtaatccacgctgctacttttttttgttacttttgcatgcatgagaaaaaaggctttcgtcgttgtactatgagataatggtttgcaaccatccacagtccttcgaacaaagcaagattgtagtcctcttgattgctgaaaaccagttgatagaagccctcatacatatcaatattttgaattgtgccactccttgcccagctatgttgtagttttgcttctaggattcgaatgctaacccttttactcagaacattaaccaccaacatgttcaacatggaaaagcccacctcaacaattctacatcagatagagggataactaatctatcaagctttttttcatcatttgaattctcctcctttggcatttcacaaaaactccattaaccaccactccctccatcaaaaactcatttatctaaaaattattataaaggttttcttagaattttaaactttaaaataaattgtaattacttttttaatattgagaatagttgtgtaaggttcaatagtctaattatttaaagtattttagtttagattaaattaaaacaattgaaaaagaaacacttcaaactggttctctgccgcagttttggacttgttcaaccaattctcatcaattttcaaaatgatccaattttttgaaatgtccagataggtcactaatcgatactcaattagatcaattaaatcatccgattcaatccaattttcaaaacattggttaaggaactattattggtccctacaaaattgcctttagcccttaccagccaagagcaaagaccaaaatgcatttggagcattttaaacccatccttccccaccccacctcacccaccactctttcctcctcccttttctttgttccttttaccatttcctcttcccctttctacattcattcatttctttcctctttccctcttttccactcccagtgttgaaggtttcttttttctgtatttgtaaatgtagaaaatcaaggaatatcagtggcataattattaggaatataatcagtttatttgtttccataattattaggaatatcatcagttgttttgcattgttgcaaagaatttttcagacgcctaacctattgtcatctcttttcaacatactttctaatcaccaccttcaacttgccactcattttctggtgagaaacttcctggttgcctctctgtcactgtactttttcgatgtgtggtgacttttgtgcttcattggcctcgtttgtctttgtcccagatgcactggcattgtcccaatcattggctcaactaccgtcctcggggtttgaattagttaagaaccatctttttcaacaactgcttactagttcaatccattgttgtcatgaacattagtttatcccaattgtttttaccaatcgtcttatcagtttgaatggtaatgtattgtaacaagctaaaagcgtagtaagccttagcttgaggggaagtgttggaagctgtgattcgtcagctcttcctttgcttgtttcaagtcctatttgttgatatttgagtctctagtgttctcgcattgctatcacgggtttttgtccgctcttctgcaacatctaagttagaagaagaatatttatttttttgtgtcattctctgcgcagtggagtcctgtacctcggagatgtgttcagtttctgaggttgatcgccacttcatcaaggataaattggatgatagaagtgtgtgcatgacatacattccaaccaaggaacaaattgcagacatcctcaccaaaagtctacctaagttagcatttgaagatctgattggcaagttggaaatgatcaatatttacctcccaacttgagggggaatgtagaaaatcaaggaatatcagtgacataattattaggaatatcatcagtttatttgttttcataattattaagaatatcattagtttatttgtattcattatttcttttttattagggttgattttgtaattagttagtttccttttttactatttgattagtttccttttttactctttgatgacatgtatacattgaaatcatttcctttagtggaaatatatgaaaatcatgcatccacgcagtaatcattacagaatcaagattttgttgtaaatttttatacaacgaaatcatgatttcatttttttcccataattttggcaacacaacagaatcaagattctactgtgttgtagtttttgttgcacatcaaaatcataattttgttgtactacaactttgccccttatgtaacacaatgaaatcatgttgtcgttgtgtaacaagttttgtaacacaatgaaatcatgctttcattgtgttacatttttttcaaaaaaaaaaaagaacaaatgtatgatttggttatacagtgtgtaacaaaatcatatcgtacatgtggtgcacaataaatgtatgattttgctgtgcagttttccccccaaaccaaatgcacaatgaaatcacatttctactacactagtggaggtgcgaaaaaaattataatgtacaacatttttcacaccctcttaatgcaatggaatcttgattccgatgtccatattaggaggggtaaatttggaatttctcccattggttattacttgtcccacaaaactaacgagtcgttctgtcaaataaaatcaactaaagtaaaatcaattaaagttgcatttcctttgcaattttggtgctgtaacaatcaagttggtcaagtgttgctggtttgtgtagtggtggattttgttgagtttgttttataactgtgtctaacattttgattggttaaattattggcattgtatagatttacaatgcccccaacggccaatagatcagttgtatttatgataagctctcatatatatctaaatcaatatataatatattaaaattgtgttgtttcatggacgttaagtttatatatttctcatcaaataagatactcttacttaggttgtgttttgcttaaagagaacaaaaaatgtccaacacttagtgttgggtgaatttatataggatcagtttctctctctcttaagaagcttacgggactgaaacagcttaaggaagaagaagatcacagcagcagcaacacgatttggtgtgcagtgtgtgtcgtgtgaatggaaagagagagtcagaattgtgtgtatctttcaccataggagcgtttcatttataggaagctaacctaatccttggtgataagttgttgaggcctgttatctttttccgagatatctggaggtgtagataactgttatctgcaggtcccccgcttctcttcgattgttatgataagttgttggtaattcgaatgtttgaattaataggataaagataaaatatcttttatccgtaacaggttgaaacactagtgtggaccttgttcacaacataatcgccagggaaaaaaaaaacctagaagtgaatgaacaaggtgagtgggtgggtgtggtgttgggtcgggggggataataaattagcagcattaagaagttattgccgcattgtctaaacaaactaggtttgtttgaaaatgttgatgactttggaaaaggtttatctgaaggcttgctggtcatcacaactagtagctcagaaattcactattgacatcacaaagtcactctaccaattaaacccaactgtgaaacaaacaacttcaggaacacacgatttcctcattgcacattattctacttcagccaaatagtcatcaatttcggctggtgtcaataccctgcaacattattggcatgctattattactaatcacccaattaaacaatagaagtatataaggatgattttgaagtttgaagtctagattggtttagaatttagaagcagataacttgaaagtctcagttttgtgatgcaattgtcgcgtactctgaaatattctcaatttattatttcagattggacaacccaaaaatcaactcaattagactactgatgacagaaaccagagtcaagaaactaggtatattttaagtaaatagatatgcacctgaactttttatcagcaccgattatgccaattccaatgttttttcctgagatctgtccctcaaacctgtgaaacccccacaaaagaaaacaggagagaaaatttgagaaacgtttcaaaagactaagcaaataccacacgggttccaaaaatacagtagcaggtgagaataaaaaacaataacataaaaactgtcaataaaggaaaataagaacaggcataactgcctgtcattaccaaagtttttaaagtaataagcttgatttaaaacttgcaagaattaaagccagcatatgtgaagatggtttggagggatgtaccatgggtaaaatgtcaagatgaaaataaaaaaataatataaaataaattttagagcataaacttgaaatagcatgctcctacccttccttcagagtcaatattgctgtgtggactgcatcatcaagctccatatcatctgtgtacctgtaagtggacaatcaagtcaaccatagaaatgatagggaaaatgaaatgaggtaaaactaatgcaactcaaatcattcaaagaaatataatataatcataattaacttcaaagaaaaagttccaaaccacaaaattgacaacttttgaagaagatatgcatctttattttttggtaagggaagaagagatgcattaaaatagacacaacagacaaatcaatttacctcttctcaataaacgtctttgcatcagaaacatttttccccatagcagaagctttccaagaaaaatatgaacctgatggatccacctacagaaaaaaaaaatcacatcaaatcacaaccttcaattccctctttttaaaattcaaagcagtaattttaaacaagtcttaaatgaaataaagtcttcagaaaacttcgatgcaaagaaagaaaatgaagaagaaagggtctcaatgttattagccacttaacaaaagtgtacatataagtattatagtatatgctgtttcaaagacagctagcataagtagcttaactacttcttaacaggactaattacctgagtgtgcagttgagttactgcaccttgaaggttcaatcacgttgagtttgctccttaagtagagaaaccgagtgggagaaagcagtttagtcaaagtgtctgcccattggggctgtaacatgctgaaccactagttgtttagccaaaacttgctctgacaaaacacatcgatctccatatgctttgttctcgagtgaagtacaggattgtgagctagagtaactgcacctctcacaatatagcaggttttagatgaaggtcgtgatacaatgaatgtcccttgagatatctgagaatcgtcttaacagcaacccagtgagaatcaagaggtttactgcaaaacttatctcaggtctagaagtaggtttggaactggatgatgtatctgactgaggagcagaaccagaatcagcaggggcagtaactggttcaacagaaccaggctcaggagagtgtcatgaacagttcatcctcctacaccttcatcatccacttcttcccttcccccggcctctatacccattgtgtcgcctgttcaggttaatcaaactttatcccctcagctcactacaccaccttccaacacttctactggttcatctcagtcctctactgttcctcattcccccgaggtatctgccacagatgctcggcctctcaattctgatagtgtcagcgctctgataccatcttaagaaaacttagatcgagagtacaaacacattgaatacacaaatgtctagatgcatagtaatatagacaaccaattgtctgagaacacacttgaattttaacacacataaatcaatgagcaattttcagtttgaagcaaaacaagatagcgtagaatttatgtaattaaaatataaagtctttagagaatctaaggaacacttattcatttcgctaatgaatgaggttctgaagtctagacttgttacacacagtctacacatatgacagctaaacatacagaattcgagttcacaacaaagggttagacaattcaatgtaatcacaaattaatattgcaagtgatggccatttaccagggtttaacatgtcaagaattacataatgaatgtttacacacctgatataattgtggtccattatcatcaaatccagcaactaggagtgacactccaaaaggcctaacaccactatcaagaccaaaacagaaatgtcagaattcaaaaaatgataaagggtaacaatggaaagtaaaaatagttgggtgtatacaaaaataatccaaggatcaaaccaagttcaatgcaattagtgagatgcttattaaggatttatctactataaaggtctgtctaagtttgacatggaatatctatatggattacaatatgtccaatttatctagcatatacctccagaggaaaggaaacaactagagtaatacttcaatcaatattaattcatgcattcagaaagataaggccggtctaggcacctaggtttatacttattccaagcttccaatttccagaaattatattcatgttccaaaagctaatgataattgtgactttggcaaatcattcccttggcatttaattacatcaagtgatccccctcaacaaccaaatccatccgaatcatgttcattggaatgaaaaatttataaaaacttagtttattataaaaaaatagtcagtcaaaaaagttaagagagaatcagtagcaacaaaattctggtgctctcacccttgagttagaacagagctagaactcattcagatttaagggagatattggatctagatgtagagctactgccagaagaatgcaggtctcaaggagatggtggagtatattggtgacaaatatacagcattttaaaaaagaaaaactacaaatatgataggctcaaagagagctctatgctacactactcctaaattctacaactaaaaggataaacaaaattgacattcttcattgatgataatagttgaaggagaatacatttatatagtcttaaatgatattaatccatggatatatttatccaattgtcaacatcatgttactctaagcatataaaaataaaactatagtaaaaaaaatatatatatttaactccaacgaatataatcctttagccactttaattttaggatatatttgggccttcctaagctcatcctaacaaaatacaaatacaaatacaaaggaacttccatcctatgcaaatgagtagttgttccagtttgcatcatttcaatcctatcgaacgtaattaagaaatgtactgaaaagcagaccaatctgagaattcaaagacagaaagaactaatgtttgtctccactataaaaatagttttctcacttttctcattccttgtctccactatcttcaattcttaattcctccaacttctacaaaactaatctatcaaactacactttgaatgcacaaggaaacttatttgtttgcagtatacttttaaatatatatgaagtatgatcaaaacaaaattctttattaaagaaacccacaacaaaatttgaggtttgattcagccttttcactgttatgcttattaaaattatggttcaaagtttgcacttcaatctttgtaagcagactggaacgaaagcaaataaattccaactctaaatgcgaatttaaaatatagaaattaaagggtagttgaattttttgaaaaaaacaaacccaaataggcaaaacggttcgtttagaaacagtccagcgtcgcttttgggaactgaaattgaaatcgcagagaataaaagaagactaataccaaaaaaaagaagaaaaaaacacttaatggaaaaggtttcgaggctgcgctggtgactcaaggaggaagtgagggactgagtgcaaacaaaagaaatgaaagggaaaagagaaaaaaaaatgaattaaaaaaagaaggtaacaccctattcatttcattcattttttttttcggatttcaattttggtaatgggtgagaatataagaatatctttaataatgaatctgattttgatattttaaattattttatagtgagtttcataatgttaaatgtgcattaagattttatcttttttattattttaatgatagatgttaatttgagattttaagtcatttttttattgggtctcataatggacttcatttaaatatatttattaattatttttaaataaaatatacatatttgaattattaatcaaataatattaaaaattgaaagtgctgataattaaaatttttatttattacttaaagttaaatcgacgaaaaataaatatattgcataagcaacaaaatacaaaatattaacattaagaaaaaatataattttatcattattgtgattgaaatacgctgaaatatgttccattaaatttgtttgaggttgttgatgaactcctcttgtatgcatatagtgcttacatgtaagtatgtagcaaagtcggcaggagcaccacgagatatgtcaaagtttgaaatcttttcttctatataattataatcaacatcaacattatcattgtatgtatctcgttcgtattcaacaatcatgttatgtaatataatatatgtcaatataatattcttcatcgtatctatatgtcaattacgcaatggaccgcatataattgcaaattgatattttagcacaccaaatgttctatccacatcctttcttgtcgattcttgacattttgcaaataactttcttttctttccttatggcatgggaatggtcttcataaaagtggtccaatcaggataaatgtcatttgcaagatagtatctcattggtggtggtggtggcatgtcaggaaaaatggagaattttgagaattttcggtggaaagggattgactattttgcataaaattcattggtggtggtggtggtgacatgtagggaaaaaacggaggagtttgagaattttcgatggaacgggattgattattttgcataaaattcattggtggtggtggtggtggcatgtatgaaaaaaatggaggattttgagaattttttttgaaggagtcgtttggtaattttgcaacaaattgtaataagtttgccaatgaaattgatttggatctataagagatgaaactaaagaaatagattatgattgagaaacgaagaatgagaatgagagttggtgtgtaaaatgtggcaaccaatgaggctatttatagtatttgtcatgtctaaatttgataatatttcattctaaaaaaaattaaaaaaatattctaatgttcaaattgtagcaaatgataaaaaaaataccatatatgattgacaagcaatgtttacattcacttgccactttgtcaagaaatggtaagaaaaaaataagcaatctattttgtaaaaaaaaataaaaaaaagctacaccatacacacccacccaacttgtcccgttcccttctttcgcttcccctaaactacatttatttcccttaaatacaaaccctcatccacccccttctttctcttctccctctacccttccccgagaacccctccatggtggccttacactccacccccaacatccctctccaaccaccccgacatactcatcttctcctccccttccgtgagaaaaccttcatcaacccctaatctccctctggcaaacccctccacggcggcctaaccctcctccgcccccaacctccctatgtcgaacccctccatgtcggcctaacccttttccaccaccaacctctttctgcaaccaaccccgagaagcttgtatccttcgatttcaaccaaacccaaaccttcatctgcaattgtgacacccctgaatgttgacttcttggcggctttcacgctacaacacttcacacaataacacttcactcaactcctcattggtcagaaccctccattggtcaaaatcctccgtaggtagccctttttaagacgtcaacaattttctctgtccatttccaggaacaatgactatccccacaaaccgaaacgacactttttagcatgcttgtccccactcacattttccaaaaaacttcccagaatgtcactcatcccataactactcaaagctaagcatgcttaattgtagagttcttaagtgataggctaccgaatagtagatacatcttattggtataggtaatagcaattaattccttcgagtcatcctcaactgagcagtcccatttctacaaaacctttggatgcttctcattctgatgtgattagtccagggtgttacagcccactagctttcgcttggttcgtccttgaaccacaccgtactaagagagaggttttcgctaatacatgaaatgtaatgcccatgaatgtcgacttctcgatgcctctcacactacaacacacacgggtggactaccattaaccaagattgaaacacacacggatcaaaacaccctttgatccaagtgttattcatttaacatcaaagcccatcctcttcctcatgtgaaacaagaactcacagttaacacaattgtatgccttttcaaagtctaccttgaatatcaagcaatgtttctgtctctttctagcatcatccgacacataaccaacatactatccaacatgtatctttccctcacaaacacactctaattgtcaataatgatttttcccaacactaccttcaacctcttagtatggaattcagagatgactttggctatgtttggcaaagcattcaactagcttctaactttttttactagctgaaaagcttgtttgattgttcgataaacaagcatttttttagaaaacttcacatggtgacacttcactcaactccttgttggttagaacccttcaccggtcagaaccctccttaggtagccctttcgagacctcgatgatcaactttctcgactttcaagaacaacaactatgcctacaaaccaacatgagactttttagtatgatttttccttgctcacatgctttttagaaaacttcctagaagatcatccatcccataattactccaagtcaaacacgcttaactatgaagttcttaagtgataggctaccgaaagtagatgcatcttgttggtataggtagtaccaattaattcctttaagtcatcctgaactatgcaatcctatttctacacaacctctagatctctctcattctggtgtgattcatttgaggtgttacaacaaccacccatgagatcctttcttcttcttcttcattgatctctcctttatggctgccaatctcataaaaatcacatagatcggcgatctccatgctccttttcacaaaaaccgcaatgggaggggtagcatcgccgatgatggttcgaagttctgtggcggtcgacgtgtcgaaggtgctcagtctgagaaggccacacaaagaaaaaggtgaaggaccttgtcaaggaaggggtggtgccgccgacggtagttcaaagtctccaagacatgccagaggtgttctattgatgttgttgtttttgatatgttgatttcttagtttgaaagtcttttcttcttgatctgttgttgttctggatttagttaaagatatattgatttggttgatgcctcattgttctagatttggttgttcttttggacttcattgttgtttgttgttctttccttttttttccaccatttttgttacttccctcccaaagctgttaaggagagacattaacaaactattttttaagtcagtgcagatcttcaaagtccttctacaagaactcttcatgttggtgatcccttccctttctttaatggaagatcttgtcaggaacatatcttgaggtgaagatcccacctcaagaccccctgataaagatgctagctctgagggagttctgttttggtgattttttttttaaaaataataactaatattcaatcagtttgtgatttaaaagaaaattttgattcactcttaatgtaaatattattaaattaatttaaaattttagagcaacttaatttttacttaattacaatatttataataattaatatgtaatatataaaataattattagaattttttatcattaacttttcatataaaattctaattattatcactatgtgtttaattttaattttaggaaaacaaattattattattattataataatataatattttcctcattaaagcatgacaacatcattgttgaatatatatatatatatatatatatatatatatataaattctccgatttttttttttacttttgaaagattttataacttattcaagggcaagtttttttttttaattatgtcaatatttgttttagtgatggattggaaaccatgtttctaaatgatataaaagcataaaaaaagatatttgtcaatttgtgttttagtgataagtttgaaaattataggtatagattacatccacatataaatgtaaagttttattgttataccattttggggttatgtatgtctaacttaacccatgaatccaatatacccaacccaactcgaaatgaatcccacagcttggttcaggtacacattcattgatttatttagtttctttatatcctattgtttggttcaattagtaggttcttaaatttcaaataacaaatatgaccagacctaacccgaaattcctttaagttgagcttgatgagatagtctaactctatgttaggccaacaaaacaatgggctaagtcgaccctgattaaaaataaaataaaaaattaaatgtctttagtatacaaaattctaagaaatatatatggatttataataccaccaccaccaacaaaaataataataatagtaatagtaataataataaagttaaacatagttataaggttcgactatagtgacttgattttttttgcatgctatttttagagtccaacctgaaaacaataataaacacacacaattatccaagagggggggggtgaatttgttaaaacagggacttaaaacatttagcaatggagtaaagatcgtatcacaagttttcccttgttaaaacagaaactttcaatcaatcaaggctcgccttacactttaagcaattgcagaaaaatatttcagttgatcttgcacaagataaccaagtttaagatataaagaattagaatcatgagaacaccaaatctatactggttcacccctcaaaagagaagttacatccaatgtcttctaatcaaaatttgttctttaccagctttacaagtgattacctttatcaaacctagataaagaaactgaaatctaaaaccctattagactctaatcacaaagaatcagagaacactactctgttctttcctctagactccaaaaaaagctctaaagaaactctttgatcttagtacttacaagaattaaaagaaacaagtaaattcaaagtaagagttcaagagagatacaaccttatgatcatcagaggatgaatgaatgattttaccaaacaaatacagattgcatgaatgctgatgttgaaaagcaactctcttgaaaaactcttgaagaatctttgttcaaaacatatatgatcaatgaagcatgatttcttgagttttgaagaagagagtggtgtgatttgtctctttagcaaggttgtatttatagatgattttgggctccaaagtttgaaatattgaaagtataactgtcatttcgaattaacccactaacataaaagctcagatgattcaaatttttgaattaggtgacagttaggcaattagaatttccaaaaaatctttaagattttgcagtaactccgtgaataatcgattacgagcttatgtaatcgattaattcgtaagcaaaataggtttctgcaatgggctgtaatcgattaacacgaggcgtaatcgattaaaccagtgagagattcatttcaggaagatgaagtataatcgattacaatatgtggtaatcgattattcgagtgaaatgtaatgttttaaaagatttttcaacttgtgtaattgattaattcgatgccgtaatcgattattccagtgaacgttaatttttgaaatcattttaaatgaagaataatcgattattttgagtctgtaatcgattacataagcacaaaattcattctaaaaagcttttaaagtccatttaatcgattattcctaggcttaatcgattattatagtaaatttattagtatgaacagtaattatgcagcatatttcgaatttattgcatttgaaatgaatgaccaataaatgattcaatttcatgcagataatcacataaaaaacatgctaacacacactagattcatctagaattcctagcatgtttctaagtgaatagaatctatctcttgctaagggtttagtataaacatcaactaattgattttcagtttcaacaaactcaattttgacattaccctttttggatgtgatctctgataaagtgatgtctgatctcaatatgtttggtccttgagtgcataataggatttttggaaatgttgatagcacttttgttgtcacacaacaaggggatctcctgtagctcaacaccaaagtcttgtagttgcttctttaaccagagactttgtgcacaacagcttacagcagaaatgtattcagcttcaacagtagaaagggctacacatgattatttcttgcaatgacaagaaatcagagagcttcccaataagtgacatgtaccactagtattcttcctatccaatttgcatcctgcaaaatctgaatctgaatatccaattatactaattgatgtacctttaggataccataatccaacttttggtatggatttgagatatttgagtatccttttaactgcagtaagatgagattccttgggatttgcttgatattttgcacataagcaaacacttagcattatattcggtctacttgcagttaagtataacaaggattcaatcattcctctgtactttgactcatcaacactttttcctctttcatctaagtcaagatatattgatgtagccatgggagttgtagcatctctgcacttttccatttcaaatttcttaatcatttccaaacagtactttgaccggatgagatatgttccattatttaattgcttcacttgaagtccaagaaagaatgtcaattctcccatcatagacatctcaaactcactctgcatagagatagaaaattccttgcacatagactgattagatgaaccaaatattatatcatctacataaatttgaactatcaaaatatcattgtttcttttcttgatgaacaaggttttgtccacttgtcctcttatgaaagattggtcaatcagaaatttgctcaacctttcataccaagaccttggagcttgtttcaaaccatacaatgcttttctcagtttgaaaatataataacccagttttctaaaaaaaaaaaaaaatctcatacgaacagcgtgggaacggcgcggttagcgtgggatgcgacgccaatagcgtgaaaggtggagccgttagcgtgagattgcgccagagggctttttctttcgaacaactggcgcgattagcgtgaaaatggcgccgttagcgtgggagacgctccagaggccatttcatgcgattttatggtgcggatagcgtcagtttggcgcgagtagcaccacagatgcgcccaattggcgcggttagcaccgtagtggcgcggttagcgccataagtgcccaggaagcctattgttatgtgaatttggcgttaatagcgtcagatatggcgcgattagtgcgggaacgcgggcagaccctgtaataaaaggctattttacgaaattcttggccaaaaaccttgcttcttctccctccagcaacccttccaccattgttgagtgcccaagcttcatttcttcaccatatctcaccaaaatccatcccttaaacacattttgtgatgaaaatcacttcttgagcttgaatccttcctcattttcacttgaaaatccctaaatcaaagaatccctttctcaagggaagttcgtgaaactcgagctcggcgaggaacggcgacgaatcgtgagtacccaagttaggggaagtcgtccgtggaccttctttgccatctttgaggtaagaaactcgagaatcacctcttgatttgtgagttgggattttgggtgaatagtgacccacttttgatagagcaagttttagctttgggtcatgttgaaacatgtgcgtagaatgttgaaaggatgtaggattagctcttaaatgtgaatttggtgaaccttggttccttggctctttgtgaagcatgtgttgttgttgggctgagttgcttggccatttgtgaacatgctagagccttggcttatggttttgatggccttgagaggctattggtgtgatggcttgtgtgtgataagccttgatgaaccataggatagatgaccttgtggttggaaaggattgtgagtcctttcactttgagcggttgtgaaccgtatatgcttgtatgcattgtgtggtttgttgatacatgcttgtatgtgccttgtatagggcgtgacaccacgggtgtcggtggcgtgagccacagagcaagggaagaaccgtagagctcggctttgccaggtaagttcttggacccttggggatgtttcccacttgtttgtgctctaccatactccgtgagagtagtggtttcattcatgatacatgcattgtgtggatgttgcatactcatgataatatatgcttgtatctgtgcttgagattgaattaagcctgttattagatcttctggccagttaagatagatatggacctccctaggagtagagtgcacctcctagtttggtttgctcatggttgactcggtcccgggatgcggatgattccctaagaccaagagctaggtgtgtcccgtcgcgattgattgcctagtctcggaggtaccatatacgtgcgtccatgcgaagggttagcacccaatgggatgacacgggtgtgaattccgatttcacactgaggtcggcgtttgactcggtccgccatacatagagcttggatagcttgtttgtattgttatgagtggccgggatggcccagatggttgtgataccctgatgacttgtgtcatggtgagtgagtcagggtggaggagatgcctgcaaggaccctgatcttactgagatgtttatctcaccccgtgtggggcttgtgttttataggtgatgcttctggcagagaggagcagtctcagggcaggaggccccagtagagacggtacctgcttggccttaggcagcagaggatagcttggagctcggctcagcggtttgttttgtttatgtgatgtacccctgtagagggaagacatgtgttgcacatgtagcttgttttgtatactttgatgtatatatatgtatgccctcgtgtgaggaaggatcctcgggatcagaaaacgctcagacgcttattcttttgtattagacaccttgggtgccagatattgatgttgtatatcaccggtttcgttctgttatgttccctctgtgtatatctttgagatattgtgtttctgcctatggtttggttgtatgatctggttaagcaggggcttgttgatgcttgatgtgggttgtgattccatacataatgtgatcaagaaatatggttttggttttatgctttcgcgataaacttgttttaattaaagtgttttaagtgctaatctgatataatcataatgataatacgctaggtatacacggggtgttacagaaaacatgatttggatgtttaaaatcaatgaaaccaggaggttgatcaatataaatctcctcctcaatatgtccatttaagaaagcacttttaacatccatttgaaacaatttaaaactcattaaacatgaataagcaagtagcaacctaatggcctccaatctagcaactggagcatatgtttcatcataatcaatgtcttcctcttaattgtatcctttagcaaccaatctggccttgttccttatgatgataccattttcatcaagtttgtttctaaaaacccacttggtgccaataagtttatgagaagaaggtccaggaactaatttccatacttcatttctcttaaattgatttaattcatcatgcatggccatcatccaatgttcatcaagtaaagcttggtcaatgccttttggttcaatttgtgaaacaaatgccattgtacaaaaaagatttcttaaagaggatctagtagaaactcccttcgatacttcccttatgatattgtcaagagaaagatctttagtagttctccaatccttttgctcttgaatgggtgttgaatgttccacattgtcatttgaatcaagatttatcttttcattaaactgcataacatcttccaattttcctgcatcatcatcatatactttttcttccttggaggtgttagactcatcacatatgacatgcactaattcttctacgcataaagttcttttattaaagattctatatgctttgctttgtaaagagtaataaagaaagatgtcttcatcggctttagcatcaaatttaccaagtgaatctttaccattatttaaaataaaacatttgcagccaaatgctcttaaatgtgaaatgtttggcttccttcttttgtatagctcataaggggttttcttcaaaagaagccttataagaagtctattcaaagtgtaacaaacaatgttcactgcatcagcccaaaaatgttttgacaagtttgtttaattaagaaatgttctagcaccttcttcaagggatctacttttcctttctacaacaccattttgttgaggtgttcttagagcagaaaaattgtggttgattctatattcctcacagaatttttcaaagttttcattttggaattcaccaccatgatcacttcttattgaaacaatattgcaatctttttcattttgaatagtcttggctaattttctaattgctgtgaatgcttcattcttgaatcttatgaacaaagtccatgtgtatctagaaaaatcatcaacaatgacaagaccataatagttacctcttaggctcatagttcttgaaggaccaaataaatccatatgcaataactcaaggggtttagtagttgaaactacattgttgatttgaaaacaattctttgtttgtttccccttttgacaagcatcacatattttatccttctcaaatttgagcttaggtaagccaatgactaagtcttttctaatgagcttattcgtatgatgcatgttcaagtgactttctcccctatgccataaccaagtatcattagttttactgattaggcaattaatattgtgaatgaatgcatgctcaattgaaagtacatagatgttatctttccctttcccaacatgtattacctcaccattttgactatcatcaaacaacaattattgttgaaggaaacattgaaccctttatcacataattggattatgcttaggaggctatgcttcaatccttcaacatatagaacatttctgatcatagtcctaatgttgtctcttatgttgcattctccaattattttgcctttgttattatcaccataagtgacaaatcctccatcctttagtttgacatttgtaagcatggatatgtcacctgtcatgtgtctagagcattcgctatcaagatatcatagtgatgattttgctctaagacacacctcatatttagcactagagaattcttcatcattaattagagttgatgtcagacaaacatttgcttcttcattctcactagctgatccagatgttgttgattcattatcttcccaagaaatatatgcattctttggcttagtatctttcctaatcctcctttcaccttgttggttctttagaaaaactggacaatcagatttgatgtggccaggcttaccatattcaaagcatgtaaagttggtggatttattgttgttgttgtccttttttgttgtggaactttgacggctttttgtttttgtttctcttcataaacttgttgaatttctttactattaggttcaggttttcatcactttcatcttcatcacttgaatcttctttttctccacacttgatgatgtagcttttaaagctatacttttctgttttttatctgctcagaatgtgttaattgaggcatttctaactcatattcaagtagcttactaaaagtgcagccatagacattttggagaggtcttttgattctttaatagttgtaacctttggtttccatgatcttgtaagacatgtcaaaatttttatgttcaacttttcaacatcaaaagtcttttcaagactaagaagatgatcaactatgtgagtaaaccttgtttgcatttgagatatggtttttgtggagttcatcacatacatctcatactcatgaatcaaggcatgtttccttgatcttcgtacatcctctgtgcctgcatgagtaatttctaacatatcccacatctccttagcacttgtacacctaacagttctgaaaaactcatcagaagaaagtgcagaggtgatcatatttttagccttaaaatcatattgcactattcttttttcagcatctgacatttcatcccaatctttgagaatcaatttaccatcagcattccatgcacccgggtcattagattgtatgaaaatcttcatatgattttttcaaaagctaaaatgctctccctcaaccatcggtggacaatttagggagacaccctctttgaaattaatcttagtagtattcattttttattgaaagatagtgatcttgaataaatctcaagaaccagctctgataccaattgaaaatactatgaacatacttcaaataaccaagaaggtggtgaattggttaagattgtctttaaaaactattcttgaaaacaatttgcggaattaaaacttggatcgtatcactcaatcacccttgattaaaaagagttttatttcaatctaaaatcaccttgaaatgcatgtaatgactgaaatgcttcttgttgattgtatattgatttccaaacaatagtaatgaaagaaatatagataaagaatccaacatataacaatttatactggttcacctcacaaacatggaggctacatccagtgtcttccaaccaacattaggttaaagttttcactatatcaaattattcttgtacaagcacaacaagtgacaatctctatcagcactagacaaagattctgaattctaaaacactattagaatacaattcataaagatcttgagaaacctacttagatctccaaacctagagaacccttctctaaaatgctttacaaagaatcaatttgaaatattacaacacaacaaaatatcagaaaatctaaaaagaatgattcaagataaacactacctgtgatccttcatgcatgaatgaatgaaaatgaattaagattaccacacattccaggtagtatgaattctaatgctgagaatcaatatcttgaaaacttcttttctttaacacttcttctctaaaaactcagaaatcttgatcttaacaagatgtgttactcactaggaaatcaatctcttgaacacttagaaagcttagtgtcttttgggtaagtcactcatatgaattgaataattcttacaaggtctatttataaagagttgacctacaaagctttataaaaaaactgatttaactgacaataatcaattaatccgttggtgtaattgattatttcccatatgtaattgattaaaataattaaataattgattaaattgttcctgagttttctagaaaaagattacaaacaaaataattgattattacgcaatgtaatcgattaaagtagaaaagcatagttttctaaaaagcctatgtaatcgattacgataaatggtaatcaattaaagcaacaatgtatgattttccaaaatacattatgtaatcgattaaaccaatattgtaatcgattaaagtgttcttcatgacttttccagatttagaacaaaaacatttaattgattaaaacactgtgaaacgaatccctgacttaaaaggaatgggaataaacaactgactttcttctcctagtgcaatctatcaattaaaatagtaagttttcatttttccaaaaacttagccatgaaactaaatttcttttgaaatcatttagcagctttcatgttttattgcacctatgtatggaagttaaatgagacatgcaaaatgcaatgcaaagcaatgtacttgaatcaaacttaaacaaattgcaaatgtcttcatagtcgattgggcatgtaaaaagaaaaaatatctttaggccaataatcaagcttcttcttcattcttgctttgactcttcttgcagctcctcctatgttcaacatagagcaaccactatcaaggtaccataatgttgattttgctcttagacacctgcaaaaatcaatttaagtaacaaagataggtacccaatgtgggttgggtccataggggttagttggatttcttattcttttagacagccaaatgcattcaccattagacacatagtatcttctagcataacacttatgggatgtatgacctcttttcatgcaataattgcaagtgatagttttttatgctcttttaaaatgactcaattgttgatgcttattttttgaaaagcctttttgatacttttgttttggaggcacaaatcttgtttttccaaaaggttttgatccatatttgtaccccaaccaaaagtatctccaacatatttttgcacacttagcatttgatttaaagtgcatttgcctctataaagctttttcaaaagatcaaccaaataagagtttttaattagcaatatcatgtattttttagcttgactctttttgaactcatcaagttatttttgcaaaagcttgcatttatcaacatttgaagatgatgagggacatacacacccattaactttgtaacttgaaacaattttttcattttcttctttaaaattgcaaagttcagattgcaattcagcaattctggtaacatgccatttaagaatacttttcaacctattattggattgtccatgtttttgggcctctttatgcatctcatgaaaaacatcaacaatattatcatattcagaatttacctctgatttagcacttgagaattcttcatcatcagttgttgtagaagtgaagcacatatttgcttcttcattctcacttgttgatttagaagtagttgaatcattgtcttcccatgctatgtatgccttctttggcttcccctctttctttgtcttcctctcaccttattgcttcttcaaaaagattggacattcagatttaatatgttcaggcttaccacatatgaagtaagtgaagttggtggagttattgttgttgttgttgctatcatttttcctgttaaactttgacaactttttatttttgtttcttttcatgaacttgttgaatttcttcactattaggttcatttgttcatcactttcatcttcacttgagtcttgttccctttccacattaaatgatgcagttttcaaggctatactcttgtgtttcttctctacatcatttgtatgtgttagctatgacatttcaaattcatactcaagaagcttaccaaaaagtgcagccatggacatcttggatagatcttttgattccttgattgctataacctttggttgccaaggtcttgtgagacaatttcaggattttgatgttcaattcttcagcatcaaaagtctttccaagaccaggaagatggttgacaatgtgagtgaaccttgtttggagctaagatatgctttctgtgttgctcattttgaacatttcatattcatgaatcaaggtgtgcttccttgatcttcaaacttcatctgttccttcatgagtgacttccaacatctcccacatctcctttgtgcttttacacctaacagttctaaaaaattcatcagaagaaagtgcagaagtaatcatattcttagcattaaaatcatattgcacaactcttttttctaattcagtcatctcatcccactccttgggaattctatcattatcaacagtttttgtagggatcaaaggacctttctcaattgcattctatgcaccaaggtcatttgactgaatgaatatatgcattctgtttttccaaaaactgaaatgttctcctttaaacatcagaggacgattgagggaggcactctccttgaaggtaatctgtgcggtattcattttctttaaaaagatagtgatcttgaataatactaaagaaccagctctaataccaattgaaaacaataatgaacacacaattaaccaagagaggggggtgaattcgttaaaacaaggatttaaaaaatttagcagcagtgtgaagatcgtatcacaagttttcccttgttaaaacaaaaatatttcagttgatcttgaaagagattaaccataagatatcaagaattagaatcaagagaacaccaaatctatactggttcacccctcaaaagagaagctatatccagtgtcttctaatcaaacttgattagagttacactaaatcaaaatttgttctttacaagctttacaagtaattacctttatcaaacctaaataatgaaactgaaatctataatcctattagactctaatcacaaagaactagagaacattactctgttctttcctctagagaacattactccaaaaaaaaagctctaaagaaactctttgatcttagtacttacaagaattaaaagaaacaagtcaattcaaagtaagagttcaagagagatacaaccttatgatccttagaggatggacgaatgaattttaccaaacaaatacagattgcatgaatgctgatgttgaaaagtaactctcttgaaaaactcttgaagaatctttgttcaaaacatatataatcaatgaagcatgatttcttgagttttgaaacaagatactcaactccaatgtaatcgattaatatatgaaatgatcgattaaagtattcttagcaaaatctggagaagattgatgaacaatgtaatggattaaaacgagctgtaatcaattaagcagttagtcttagaatagaaataaacatgtgtaattgattacgattgagtggcaatcgattaaggcagtcaatcacgttttgaaataagcctttgtaatcgattacaatttagtggtaatcgattaaggcagtcatgcatgttttgtatttttatgctatgtaattgattacgattgtttgtaatcgattaaagtgttcttcgtggctttgtaatagattacacaaattggtaatcgattaaagcagtgcacaaatgcattttccaaaacttaaaacatgagattttctttctaaatgcaaacatgtaaccttttatgcttttcttaactcatgtatgcatgtttatgattatggttatgcaaatgcaaggatcacaagataagcttcttgaacaacttaacaatttacaaatgccttcaatttaatgacatgtaaaaaagctaaaatcctttaagcaaaggcttcatccttgattttatcttctttctagctccctctatatccaacatagtctagcctatcataccaattaggttgggccaaatagtcctatttattttggattatcatgggttaattgagtgagcccattgagtaaggatacaaattcattatcttatattatagataccaatttcaaaatgttaaaaagtatcttcactaagataaataaacataatagacattgtcttacagttaagtaaagccacaaatctacttagaataacccctgctcaccaactccgcccaagcaactcttatgaaagttgaccttcaacctaaaaaccaactgaaaacaccttagcattgatttaatgggcatggcatttttaattaagaaatctgagaaacaaggtgtatcatatgcaaaatgtagcaaggatacgtctatttgttacctccctactttatattcagagaacaaaccttcttaggacaatgtctcatcaatccactcaaaccctttattacattgatgaataagaaaggtgcaataagatcaccttgtcttaacccttcttgtaaagagaattccatggatgaactaccattaaccaagactgaaacatacacagatcccaaacaccctttgatccaagtgattcatctatcatcaaagcgcatcctcctcctcatataaaacaagaacttacagttaatacaacggtacgtctcttcaaagtctaccttgaatatcaagcaatgtttcttctccttctagcatcatccaacacctcgttagcaaccaacacactacccaacatgtatcttcccctcacaaacacattttaattgtcaacaatgatttttcccaacactgcctttaacctcttagcaaggaattcatagatgactttggctatgtttggcaaagcattttagctagcttctaactttttttactagctgaaaagcaagtttgactatttggtaaacaataatttttaatagcttctaacataaacgataacttctaaattctagctttttatattttcttccacttttatccttaatgtatttattcattttccttgttacttttttaaaataaatcatggttttattacttctatgtcattttacactttttggctacttcaacaactagttttaccaaacacttataatttaatgagctagtttttcagcttttacctaccagctagcttttcagctttcaactcgctttacaacttttagctagtttttccaaatatagcctttgtatacatgacctataagtgaaataggcctcattctccaattccttgtgggttctttgatttaggaatacgagctatgaatgaaggattccctgcttgagccatgtgggcttgtcgtagtgcaaacctatcgatttgtctccctcctacacatttgataatgggtcgtgcaatccttttttactttttatttatttaaattatttttgagaaattattttgtactcaagagcttatttgaaatatcttgattttgatgagacaaaatttgatttggctcaactacagaaatcatgtaatgttaccattaattttttctgactgttttaaaatgtgattaattaccaaatcaattactatgttgatttcaaattatattaccgttttcaatccttttctttcattttcatgccccctctcaccctataaatatcgccttccagacctagtttcagacacaccacaacaatctgttatcctttattctttgttcttttttcctttattctttgttctttttctctgttcccgagtttgaatttttgtcctttctacttctatagccttagcacccctaagaagttcatgtagtatcctgaaagacttgcatgggataccacagataagtcctttaggatagtgctcatacatgcctcaaaaagacattgtccgtaaccttcagcattgtttccaacagatttatctaccgattgagataaaattgtatgaaacatcaatcatgatcttttgtagtgcaaactgtaagaattcttttaataggaaaaaaattaatgtataggctcttagtatacatatgatcaacaatttagtatgctatgaataggctcttggttggtgattcattatgcctctgtttccatgaagatagtttcttctttgtccctctttttcccatctatgtgttatcttatgtttcctttgtgcccaattgtcttgcttgtctcttccatgatttaagttacatgtcaattgttatgttttcaacacgataagtaattaggaataagcctctccatcttcctgacccttatgtgcctctataccactccccacctctaccactgggcttggagggcctttgtctactttatttctttgtcagctttgtgaaaattctctggtgttatgtgaatcttttcttgggctaggtttgttggggtggttttttggcttaaaggctcatgtttgttcccttccaccctcaaattcctgatgtgatgttgtgatttgatagtctgttgatgctttcagcatgttatcaatggtgtcttcgcgtggtcccatagtagaactattcccctgaagcatgcagcttccttgatacccttccatcataaccttctttcgtacactatcatcactgtattccttataaatgaggccattagttaaaccccaaaaggcatattttcctcttctttctcattgtcttcttcctcaacgagctcacattccttaagcacgtgatccaaacccccgcccgtatagtagaagttacctagctgctcatacttaaagaagattttttgtttggatcgctttcccatcttaataaacatttcccttttgagaggttttcgtacatccatggaaaccctaacccttattacattcccaaacctactctcatctcccttatcctattccacaaaaccactaatggggttgattacaagagtagcaaaactctttgtcctcctgttcaagggtaggtcatatacttgaacccataaacaacaatgtgtagtgttcatcgcttctggattctagtcactgtttagttctctcaacagaataagtcgtctgtcaaggttccaggacaccctgttcatcactttctcctttaggttttttgatatgtctctgacttccacacctttcttcacattctaggcctaaaccatagcagttttgaacaccattggtttcacattgttatttgttaaaatcctacccacaatccatatgccccattcattttttttgctgattcatcattctcctctggtacctctactaccacctcttctttgtccttaaactcgatgtttcaccaatgttgcatacgatcatagaaatgtatctcatctttcaacttgatcagaatcaattctatgatcgaatagcagaaaggcaatcatacctgctaactcctaagataaaaagtagaccccttattttttgcagaaagagttccattattgcccctcgggagagttagtctacttagcgaattgatagtagagaaaaatcacaggattgagtaaaagcctcggttggggtttacgccacttttctaaaccctagtggagcaagagaaagggggtaaatccttttgtaggatgtattctttttttgattgtaaaaaatcttctgcttgtttctcatacattggagaaagatattggcagtgttggcattcttttaacatgttgaattaaatgaagtccaagatgggtggggcatgtgtaactttggaattaagtgaattgtgaattggaaaaaaatgaattgttttgattgtgtttttgctcttcaatttttaaaaataattttatgaaatgattttaaaaataaataaattttagaccgtaggagaaagaattaatattatgtgatccaaatatttaatatttgaagtaaagtatcatatttaaattttatagataaaattttggtctccctttatctttttgttagtgattttggttttttctttttcaaattttggtgttatatttcagaaaatccacaatgtttatttattttatttttattttagtccaactcaaccttaaactttacatattcacttcttaaggtattataaaaaataatttaattaattaaaatataaaaaataaataaacatatgtaaaattaaaaattggaccaaagtactggatttttaaaatagagagatcaaaattgtaaaatacttttatattattatcaaatcataattcacctttaattagtatacacatttatcataataaggtgttttagtatacacattttatacccattttatcctatacctatattcaaaatatactattttatccttataattaccttcacaaatcacccactaacttctattatctttcttttttatttaaaaaaacatgaaaaggcactacgacacaaagtttctatttttcctattatgaataataaaaaagagagtaaaaaactaacaattataatttatttgattttttattttaaaaactaaaatagaaattttgaaaaaggctaattatatttttggtctataaattttttacaattttttttagtccatacagaaaatttctagcaattttgtgcggtactttttctttgttaacaatttcagtctctgtcatcaagtaacaatgttaactgatttatttgattttttttattttaaaaactaaaatagagattttaaaaagggttctttatatttatttttgtctctaaaccttttttttctgcaaaatttacttttagttcctaaagaaaatttctaacattcttggtccaatattttttatttgttaataaatatagtttttgtataaagtacaacatactaaccacattagtgtactagttatttgtcatgtcattaaagaggttgataaagatagtcatgcatgatatttttcataagaattctgtttttataaatgacttattttgtgcaataaaggtttgacaacgtgacaaaacacaattatgaaataaaaggaacacattagaagagatgttgaataatgtgtaataaaactttgaaatcttttttacaagatgaatcttttcttaaagagatttttgttaactatctattaaaacaaggctcacaaagaagcgtctagaacttcaaacaaaaaagcttaagaaccaagttcaaacaaaatatcgtccaacaaataaaaaatagttttcaatcaaacaatttttgcaaaagcttatgcattcaagagagaaaagagtaacttaagataacacgcgttatataaaagtgtagagataaacacaaagtttatattggttcactcaaatctcgtgagccatgtccagttctccttcacactaaaggatttcactaatcaatacaatgattacaacaagtatttttctcagccctgattacaagaagtattctttaggtcacttttgacactccctccccttgagattatgagcacctataagagtgaatacataattaagctcgaatacaatgaaaagctttgctaagaaaagcataactctctaagcacaagtgtatgaccgtccaatatttcaacagagtttcaacactttagattttctttaattagtcctgttgaatgcaatgctctgagtctccttttgtagattttagttaatagattcgttattgattagagcctttctccaaatgactttattctagcagccatatgacttttacaacatgtcactttcttgagtagagatagagagaagaaacaataatacatttgtttttgtgcgttgcgacaaattttctactccactacttgtatggatgtgactcttgcaggaatatgctcttttattctcttctcttactatatctagcctaaaaattgttggaactattagttaatttagaattggaatatatccaattgcacaagggtcagaatctgagtagtcaagaggaactatataatctactttaactgtacaaaaaaccaatttaaatagaacctgtatgataagtatgaatcagacacagatgcaaagagatgaaaagatccgagcccaacaatgttgtctccttaagacaatttgttccctccaattgatgccaaaggtttatgaacaattgtctcccaggatagaacgaatcaacgtctgaagattgatggcacttcaaatcaacagcccaaacgaacaaagacaatgcttgaggaaccacagagttatgtgatatgaaatgcactagtgtctaagcgagactatcagaaaagattaactatcaaaactctatcagttttctacttccttatttttctgattgtctctgtgtctatttatagacaacaaacaaccctgttgaagagttgccggtgaaccatcgcgactcttgacgatgaaccattgcgactctttacgatgaaccattgcgactcttggcgataaaccatcgtaaccgttggttatcggagcggttgggaatagttattttctaacctttcccaaaagcggttatgagtatttactattttgaattgttaactgcctcttattcataacccatggagtttaaataaaaaactccaacaaaaatacatttaaattcaaatagtatgaaaaatggaggaggaaataggtttaattattctatagatcctattcttttatcaaattttcaattaggttccttatttttattaaaattagattcatgattttttgcaattgggtcctctcatctattgtcgttatgaaaaattaatcgtagacacctaattagagttgcagacaatggattagtgctttcgtagtgtgttgtaagcacatattagtcaattgtgacatatttttgcagagtttcaacccttgtaggtaaatccaatccaagtattctttagcaagcctctcaaaagtgtttggttttataaaaggttgaaactgtaatatctggaatttttaaacatatgattaagcctgaattaagcacgtgttaagcttaggattaagcttataatggaggaaatataattaggccttggaatcccttgaaaggaggcttaaacgcttgagaaagagttgaaataggctgttctggcctatggtgcgacccgcgtgaagtgcggcgcgacccgcgccagatgtataaaatgtgcctatgctgtttgccatcccgcgctagtagcgtgagtacggcgctagtagtgtgggaagagctctagaaaaccatgttctcttctggagttccacgccagtagcgtggatgtccacgccaatagcgtgggagccccgagcctgtggcgcgactagtgtggagttggcgcgagtagcgtggcttggccgacatcatgacgctagtagcgtgggaacggcgcgatcagcgcgagatcgacggaaatgttttataagagaccttttgggctgagagagagagaagagaaaaaggaaagaaagagaaagagagagaaacctccattgttgattttgagagcttcatatcttctccatctctcatctaaacaccttagacccaactgagaaagtgttcagagcttcgagatcagctagtgacttagcttgattctcgagaaaagtcagtctacggcgagatcaggattccaaagggagtttttggaatcgaggaaccaggaccagaggaggcttggctgagcaatctgtcttagggaaagtggttccctagtgtgtctgagttgcacagaggtaagaaactcgagctctagtcgttggttctgtgtttgggtctttggttagattttgtatatcttgaggtgtgtttttggaggtgttagagccgttattaggctcggactctgtagagtcttatgctcagaggactgttctgaggagattagagccttgaatcatcattactgatgaagtttgattttggctctgagtctacatgagcagagataaaaggttgactatttgactagtctggaccttagagcagttgataaagttgctcatgagatggtatatatgagattgaccggttgaaactggtgataatgagaagttgagcttgagctgtaatgctcagtgtggatggctggtgttgagtctagagggactctgaggccattgtgatctgagatagaccattgaaaggtctacagataggcttaaagaggatagcctgagaaacccttgagtagaggactcggattgatagaaaggactgaggttcctttctcagagacagttgagactatctgatgagctgatgttatttatgtgcctgaatggtctgtgatatgtgcttgtttgccttgatagggcttggcacgaagtgtcagagtagcagaccattgacctgaggctggagttgcaggcacgacttgccaggtaagctcatcgctctggggatttatccctttctcttgtttaccacccaagtgggtgaggtatgcatgccatgcttgtttctgtatatgtttggggcatgctatgaaatgaagggctgtgatggcctattttatgattatgtgtaatgtgagcctttaaggctagatgaacggcgcttggaaaaatactcaggccgttccagagatatatgtgaatgtaatgatgaaccctaggatagacaatgaacagtgtgagggttatgagacacctgatgtggcaggtgtgaggctgtgtgccttttgagagaatgcagatcatgagatggtctgtgatggaaccttgaggatactggatgagtatcaggctagttgaggttccctagccagaggtagagtttgaggactccctggaatagctgagattctatgggaggtgccactgctctccaccgaaaatcctaaggatggattgtctgtttagaagttcctccttaggcagaaacgatgagattaataaagaccctggttgtggtctgtgtttgaggttagatagacactgtgattgtgtctgcattctgagattctctggccagtagaatagagtcctatggtgataggacagatggtatatgattgaaagccctaagggattgagagctccctgtgtggattgtctctctcaggtggcggtgtgatagtctgggggattgagagctccctgtgtggatcgtctctcctaggcagaggaaagtcctgtgggattgagagctcccggtgtggatagtctctcacaggcagtggattggagatcctgggggattgagagctccctgtgtggatagtctctcccaggccgtggaaagtcctgagggatcgagtgcctctgttgtgagataatctctcaggcatgtgctgtgaaagacctggagaggccaggcatgagacaaatatgttgtatctctaagagagggcttccctaggggattatagcctaaggcctcttagacgagccatatctggttgtgtaaagccctgaatggtagattcaggcaatgtgtgttgtggttatgaggcagtgcctctctgatatgagaagtgtccagtggttgacaattatgattttggtacctctgtgagagatctgtgagatgtctatgtgacggctgtaatagccagtctgagttgagatgccatggttatggctagactctgtgataaagtctggtatggcttgagagccagtatgaggtggaatacctctgatgctgcgagcatctgttgatgacccagatagctgggattttgtgaacgctaggctaaggtcctagactttttatatatgtgagctgggatgatgtctttagctctgttatatgtttgtgtttgcttgggggtgaaccagggtaagggaggaattcccagggccctgagcttactgagatatttatctcacccctgttgtgggttatgattttcaggtgcttcttctggagcatagaagcgaccttagggcagaaggcccagtggacctagcaggctggagagtggctgcagtagaagaccagagtcgagcttcaggagttggagccggtcttagtgcatctgtatagctgtagggtgggtgtacacccacttgtactgtacatattttgtcatatgacctgatggggtcttattttgagtatgtatatgtacagatgttaatggttctgttgtatagtatgtttcctcctgattctctttattttagttgtggatatttgcctatgcttgtatatgtatgttttgtttatctggatcagcagggggcttgttatgttgatgctttttgttgagttttatattctatgcataatgtaatcaagaaaaacgattcttcacttccgcactgcgttcagataacgctgatagcgcgcttatgatattattaatgataacacgtccggggtgttacagaaacatagtagaaaactctcatagtttactcagttgtgcttacaacgcattttacaagcaccagtctattgtttgcacctttaattagatatttgtgattattttttcatgacaacaaccaaacggaagaaaacaattgaaaaaaaaaggttcaaggacccagttaaaaaaattaaaagctcaaatacctaattaactgtataatcaaagtaatggaactcgaaacttggaacttgtggatcaatatagcccaaaaaatacaatcgtttctcgttccattttacaaaattgaaataatatattttttttggaattttttgctagttccttttgtcataatgtcggatagcattttttatatcggtaaatgttagttgttagtgaaagaaattcaaactcacaataactcctttccttatttctcttttcaaccaccaagcataaaacatgatagtatattagtatcaagggcaaacctatttgttgttcaagggacaaacctttaaaggcttttttaaacattgtacgtgtcttgtggacttgttttttggtagctatagttcatgattgtcaaataaatatccttgaaaaatataggataaacatagaaaagtcattcaattttaattctttttgaaatttttaaattcttttattagtagaaatgtagaacatatcatattaaattaattagtaaccaatatagattcacacgagtatattataagagttagtttaatcgttatacattaataatataaaataattttacaatataattcaatcacaaatcatcatttatatgattttgaaattaattattataaaagtcaacaaatttattatagacaataatgtgtaattaagtgattatataaaactattttacaccattagtgtatattcctttttctcataatatattattaacactcatgttttgatagttttatttgtttcttatctcataaaataaagttttaaatttcatttatttatttttatgtgttaatttgtattgtacgtgtaaaagatgtaattaatttaaatatttctatccataatttaattatttttatttttattttttattaaaaataattttaatttaatttctgttatcaactgttggcgaaaaataactttttagaaaatttgtcattgttctccctattttttaatcatgagtccgcccgcccctgattagtatcccactacttcccccttacccatttaaaatttaaactctcaaatatgccattttctcatcaaagcatcatcccaatgattaactagagttcaaattttcattttgaagctaatttcaaaggaatagtaaggccatagcggatatgtggtagttagacctctatttgttactgctattgacagatacatcccaaattttagcacaattatcatacacaaaatttacaatacattgaacaaaaaatcagattcaagtgttaatttctacaatatttcctatagctgtatgcaaatgaaaaagcaaagatgaaggagattattcatgagtgtgatttccaaggggaacactgcaggttagaacaagactctgtccatgtgcttgtgcaggcaccatcttcacccccatcacaacacttgcaaacaattccaagcgtggcaaaaatctttgagtaccctgaaaattaatcacacaaaatcagcaaccataccactagataaaagtcaaggaaatttaactccattgattaaataaaggtgtgtaagttgttataaatcttatgatactgtcttcaatttctacttattaaaaaaaaataccactagataaaagagagggagactaattatgaagcttttgctcaccttgatgagatgatgttaaggaaagtgtccttgcttccacaacagaaggcttctctgccactgatgaagcaatcaagattactaacatcaccaacacatgagccttattcattataatacacgtcacaaatatttgcttgtgagcttcaaaaaccttcaatttgagacttaagagctaggtgtaggaggagcaattgaagaattgagatttgagagagctttttgagacttgaataactcccaagattgggggtattgctaagaaatatgagaataacatgtttgttgttatatttattgacacataaatgaaaatgacaaaaaaattagtgatagtgaaaggcctagtttttgtgacatttttatttgcatatatctagaagaaaatgatgattttgtggtcttatttttttcgtttggattgtttgagatgttgggtagggtagggtgggcttctggaagagacacagaaatgatgccacacgtttccaactccactacgtctccgtggagacaaatacaaaagttggataccaatttctggccgaaacctttgtttttctttgtctaaattaatggtgagtaggacctttttttttatattattatcacatgtattattaacacaaaatattcaccgaatttatgaaagattaatttgcgtaaaaaaaatctaattgataatttttagtaaaaaaatttcttggaatcatatttttatttcatccacaagttacttaataagaccaattcagtctcatcggatgaatacttttttttttttattggattccctttggtttgtgcgagtaaagaaagacttatatacaaaatccacatgctctaaagtcagtaacccattattttataaagaaagtcactgtcagtaaccccttttaaatacaaatttagttgctattaaaatactaataattaatgaatagtatgtatatacatataataaatttactgaataccttaattagctgacacaaaattattttaatttaattagtaatattcaactttaatatgaacatgtgacagagttaaatatttagaattgtttttaccattcataataccgcatcttgcaaatgatacttgtgattttgtaagaaaaaaaatataaagtttaatttttaaatcctaaactctaaactctagaaaaaatatagttataataaattatagaattctatatactctcgttataaaaaaataacaatatcaaccaataaaaaatattattgttaaaatttttaatataattattataaaagtaataaatttatctaacataatagatttgtaattaactgagaataatcattgatatattgttgctttttcataaaatactcagatttcttattttatatttactccccttataagagtaaactcccaaaaattatacaccttagttaggtcttagtttatggtgggacctcgtctaagttcactggaattttggagattcaatttttaaaagtttggatcggaatatcgtggtaaataatataaaacatttctatgcctgtgttgagacttgaagaaatgttttcacttaaaattgttctctaacatttttaaaatcatcttcaccaattcagaatcatagaggaaatggatataatttattcttataagaattattcattattcatgtattataaaatgaataacaagtaataagaaaaagataaagagattttattaatttttaaatatttttattttgtaataagtttttttctaaatttattaaggatatcaatcgtaacataaagggtttgtgatatcatttcagaaaatcttattttcaagactaaaattattcttaaactaaacaccttaatattaaaagataaaaattattagagaaataggaaatagtaatacattaacaaaattatggaatgtaaacaaaaatagagtgtaaaaataataagataagcatgcaaaaatttcaaagaaaaaggaatgtcaaatgtttttttaggtaaattctaccgtgtgtcgcagttagctgaagggggttttcaatgtttttatgagcaaagcattaatataatgtcatttgtattaatttgcaaaacacgtaatacactttatactctagaataagagatatttaactctagaagaaatcctattccgaaacaataaaaaaaaccaaataaatattatcaattaaataaaattaaactcttatttatacaaaataattctaatatatatttaattaataaaacactaatattttaggaattaattgctatacactttggtaagaaacaaaactactacacatcgatagtataaatttacatcgctaaccaataatttttttttacggtaacaatgtatatcaattaaactcaatatttagtaatataatttaagaaattaaatatatgaaataacttaaaatatgactaagctgaaaatataattataatgttatattatattgtgcacaataaataactaaataataataacaaccaattttttttacctctgtatccttaatttaattgatacattggtggaaagaaattgtagtataactaaggtgtaaaaacatttaataaaatgtgtacaataaaagaaatttccacaaagtgtgacattaaaacattaatgaataaacattggtatccaaaatattaaagaaaattaaaatattgcatctaataaaatatttccgagacaaaaatatcataaaaaaatactataacataattttctcaagtattcatcttagaaatcaagtcctcaagtaatctttcaatcaattttttactattcaggttatgagactagcttcaaagtcaaatctaaggcaagccgcattcttgttccattattcacctataaacaattttttttcaatcatttgttaataggatatagttgtaaaaatttaacaacaatataaaatagttaactaaaaataatatttaaacttacttgtattttgtaaccatttgcatccatttgcgtcatccaagttgctacccaaataccacaatcattctattttataaaatcaccaatttttaacttgtaatttaattagtgtacatattcaataaactaaatataataaataaacttatgagtcatgcttttctatgtctctcctttcaagatgcacaattttatatttgctaattaacaatctctttatcgaggaacatgagtagaaggattcatgctgcataaatttttttatggattgagcctacacaaaaaatttagttattacattaacaataacgattgaattaatgttattttaagcattataatagtggataatatttaccaatagtttaatattgaattctcgttcatccttatttgatgttgttaaaagtgagtcatggacaacaatatctttctttgacacatcaacaaccaccaaaatccaatgagagtttttctcattgacaaggacaaatatctattcatacacaagtaaaaaaattagactatcaaaatgtaaggctagaatgacaataaaagtttattgatattactcacctttgtcaaaaattcaactttacccataaaagaatctttataatattcttacgtttttgttgggggcataattaaatcaagagcacaatgctaccaagtgaaaagatacgttaatattggtttttataacaaaaggtcaagtaaaaataatgttcaaattgttagtatgtgaatgtcctaaagacaatcttttcattagattaggacgtacatgtacttttcatattgtcatgaataaattataagtgctctttatcttgtttcatattttctctcgatatcattattaatatatgagtaactggataaaacccttggaatagaataggtatctcttgaatattagtgatgggatcacgatcatgaggattcaaggataccaaatgtctactcctaaatttaagttcctagtctagagacactgagaatagggatcagggatctcgggtaagactagcacgacttatctacttgtatgaagatacaaggtaaagacctcatgagctacagacatggaaatgtcttagctaaagtcgtgggtggacttataagggtatagctcgcactgaacaaacccacaaagagactctatgaggaaatctcacagatagtatcattagagtagcctcttattatttgggtgtgtctttccttagaccagaagttttcacctagactgtgttctagaagacatgctttgattgtatacctcgtctgcctgaaacatggagacacataggtatatctttgggcatgtcctgaaagaacacgagtctagggtgactagctgaaggaattcgtcaaatctctatgagagattaggttatctgtaaaccggagaaatcgggatgacatttacgggactcgggaatctatgcatagtaaaagaaatcatgagatgatttgcctttagagtcattaaaattggagactccctatttcgtattaaagcttaccctagaccgcaagggctgatatgtttccttaccctaggttttatgggaaggtaaccgagacgaaagaaaatacatacggaaaccaaatagatttaataggatgatcttgtcatttacctaactagttctaggacaacaaagcattgctagtgctttgtgttgtcattaaatgggtaggggtcttgttgggcccaaactcatttatgtcagtagctatgttgggcctaatgggtcacacactaacactttattgtcatgacattatagcattaaaggttttgggcctaataatggttgttggcccaagaaagagtttggataattatcttaaagagaggggcgcatgaatgaagttaatgggtttggatagtccaagatagtattaattaatttaaatagttaaattaattatctaatatttaaatttgataatttaaattttgaatttaaatatgaattatctatagtagttagtttcatatcaaaaggagaagataagagctagatttgaatttgaattcaactagcatcttatcatgatcatgtcctagattttaagaagaagtttgagggttgattatgggacttacatacggctgatatatgattatcatttggcaaaataaatcccaagtaattgacttggtcttaggaggatatgataggaggttgttggcaatttttgaaatgcaacaactccatcttatcttcacgtgtgggtgctctataataagattttggttaaaaaatctgactcaaactcttctataaaatatattcttgtgatcatggttcttagtttttgagaaaaaaaaaactatctatcttcctccttttcacgtggccctttgtgtaagttttgactgaaaattcagccaccaatatcatctattggtgtaaaacactttgaaacctaacctgctccctctccattggtgtgcctagcctgcctcctttgtttgttggtggtcttcaagaagtgttcttgagtcttgacaagaagtggtgtgaatcaacattagagggcttgtatcttcaagcctatccttgatcatcaatttcgaatataaacaaggtaacatctatgtcctaaagaatgattcttgtgtggtatgtgtgtttccgtttgaaaaaaaaattgtttttcttttcacatgcctttcggccttattaaggcactatctttcacaaattaactgaatggaatggtgtcagatgaaaaaaaaaaaacatattgaaacatgggtaggcatgaagcaaacacttgggtggttggattttgatctaactccacatgtcatcatacaggtcatctggtcaaaatattacctattagtaatgtcaattaataaataaaaagttaatatcaaaataaaggtagatatatatgattacttcttgacaaatttcttttctaagcaccaaatcttttaatgttttcctattaccactgcaaaaatctctgggtatagttattaaaatctcattgttgaaatattacaagtaagtaaattagaatccaataacaacaattatgaaagtttttttttttaaaaaaaaagaaaaatcatctttcacttcaattcgtattcaatgcaactatcattcgtttttaactaaaaaaatttacctatacattttatctacatttgatttttcaaaatgcacaataaaacataaacttcttctgtggttagattgatgacttagggtaggtgtagtttaagaaatccacttaaccactattgaaatacaacaaatcacactagaagatagttgaatagtttgttagtcaaaatgtaaaaccttttcgaaaggaaaaatgttattatgaataagtttataagaaccctcgttcagtgactaaaagtggactatagtccgatgagatataaaacttattctttagtgaaaatcttgtgtgcatagtgtgttaataatggacaatgaaatgccttaataagctaaaaaagagcagtaaaaatacttcattttatactgattcactcaacctgagctacatccagttcttctttaccaactagtaaggttttatcacttagtcattcctgattttcatcacaaacaaaagtttaatacaaaatcagagattctttacaacactcaaagagttgatttacaataaatttgtaatctgtcactagtactttgcatactacaaatgatggactctcttaaactcagtgagtttttcgacaaatgattttcttttctctcgttttgacaaatgtttttcttttccctcgtttcttgattcactactcttgtttttctatgtacatttgtcaaaattcttcaatccttgatgtcgtatttataggtagagagacacttctaattgtggagagaatcttcgggattgaatgatatgactattgtgtagattgatcttgtttcttgaaataagtggatactacgcatttctatttgataggatcaagactttctatatttgtcattcataactcaatatgactgttagacatataaaaggaattaaaagatagatacgtagatatgttcctttttaaacgaaatcatataaattgtcataaatggataattcaaataacatgctcattttgaccggtgtttggatgtaatggatgagtacttcatgcttccaataaatgagttatctagtaatggatttgtctctcttggtattacttctagtcatcaaacctatcgacttatatgcaataaagtggttaacacaaatttatatctttattttcatcaaaaccttaagagatgtctaggctgtttattgatggaccgtcaagtgtctaacaactacatgtacaaagaaaaaaaaaatgtaaaatatatattttaataaaaatattttttttaacaattgcactcgttggttgtgccaactctataagagatctatcgttgatacgataccttgcattagaagttgtggttctcaaaacctttgagggtttcatatttttctttaaaggtgagaataattttttttcacctgcttcttcttgaagcatttaccatcaccacttacattgagattaagtcaaagtccttgtttgtaagacatcttgaatgtgtgccaatagtaacatgtgttgttaaattcaacaccatttcatgaagatcatctatgtttttctttagttctttcatatcatcatgttcattggaagagcataaaaataaaaatgattttattcatataaaattattaaacactagaagtaatctttgtcacacactttgtaagaaacctaacaataaaaagacaaaaaacatatcttattatttaatgtttgacgtggagaacctctttaggatttgttttgagcatgattttcattgtcataaatattttaaacaagttgttgaacatatctgactgatttattttcatcatttgtaattttgtgaccttgttggaatttatttcacagcttaatgaatataaaatcttattagatattgttaagaaaaaaatttaaaatgcaaaaaaatcattataatgtataatgtaactacacatgaatttactttaaagatgttgataacttaatgactggagttttatttggaagacctaaacctttttacttgatcatctttaatttatgttatcttcaagaacaatcgtaagaacatttataaaagttataattatccagaatagaaaatgattaatattgtattaaagtaattttttattctaaattatttaaaaataataattaataatactacataattattaaaaactaatgaaaacataacagcacatacagagaaaattaaaataacgtaaaatttaaataatgaaaaaataattatttaaatcgaaaatataataatataaaaatcaaattattaagaatgaataagtaattattcttaataactataaaataatattatatataatattacatatttaaaatttaaaataatgacaaaaatgttgagcaatattatatattatataattttaaaacaaatataaaataaatcaaaacaaactattaatgcacataaacaatattacagcacataaataacatgtaaaaagacagcaacagataaatgattaaaaaatcaaatataccaataaaaaaaagtgatacttaattgatatgtaaaaagcaaaataaaacagttacataatgtaaaaattaaactttctagaatttgcaacgatttttaaacactatcttatttttaaaatatttgaagaaaaaaaaagggacggtagcaataccaaacccgtcaattataaatggcaccgaagcaagcacctattttatattccattaatttaattaccattggctaatagtcatagtgtaaaagctagagattttcctaggtgccgacgggcttccagaaaaactcttcatggacgccaccgaaacagagtaaaatactcttttttatttttatttttaaagatactgaaattaaactattattaatttaaaaaattaaaccccttccttatgacttgtgagagatcctgttctatacttttacccatgccacagtttagtaaagaaaataacttttttaaagaaaaagttaggattagggaaagacacctctacttacaaggcaaggaaaattggcaaaaaaattaattaattgtaatttttaaaaaaattacaaaaatgttgtaatttccaaactatttatagatgtatagcaatcaaacatgtcgcaggtggacatgtttgatcatgcccaggggggacgtgaatggagctaagtcacgtccaagggggacgtaattcatcaggggacgacatgtgtcatctcctctcaatttcgagcgcgtggccacaggtttcacctcaaccggacatcccagtcaaaagttatggtcttccgaagtttctatacaccacgccgcaatatgacacgtatctcaaaatgacatgtgtcgccccctgatgaatcacgttccccctagacgtgacttagctccattcacatccctctgcgtgtgatcagacacgtccacctacgacgtgtttgattgctatacatccttaaatagtttagaaattacaacattttcgtaatttttttttaaattacaattaattaattttattgccacggaaaactaccaactttaataaagatttgtagtgaaatttacatagtctgccaatagaaaaaaaatttaagaattaaatctaactcatagctagtgcaaacagaggattcgacttaatgtgttagtccatgttgataaataaaatattgttttaaatattcatactattgcatgaccttgaaagtttctcaaaatctttattttattttctaaatcgaatattagaaatttaaaattaattgtcaataatgatgaaagttaataagaaaatactacctatcacataaatcaactaacacaaaattatatatttaagttaaattaatgatttcgaattcagaatcatatatatatatatatataattatcttaaatacttattatgaattttgtattttatataataattctgctcgattcaagtaaaattttctttaaaaaatatactttttatctttacaaaaattaataaaagataaaaaggattaaccttaattatgacttgtattgtcaaaggagagaacaatagagtgtttttggatatagaattttaattggggaaagtaatttatcagggggtttaaaattcttcaatttaaaattcattgtttggatatttttataagaggaatttaaatttttggaattttaaaacagaattttaaacaactaaaaatgtgaaatttgaatttccatctaaaaggtgagaaattgaaattatcttcttttttagaagttctaaatgcacaattttttgctctgtttcaatcaccgacgtactccgacatccgctactctcacgacaccacccactaggggtgttcatcaaccgatccaaaccgatgcaaaccgcggtgaccgaaccgaaaaaccgaaaaccgaaataaccgaaaaccgaaaaatcgaaaaccgaaaaaaaaccgaaaattttcaccggattggatcggatttcggattggctggtgaaaaccgatccaatccaaaccgatccaattgtaaaccatatcttaccctttatctacttgggcctattccccatcatagtccaaaaatcaaaaatccaatacattgctccttaatttgttcaatgaacgtatttgtctaataaaaattagaaaatgatgcttgtttttgtccaatgaatatgtttgtttatgttagatactccttattttgataaaaatatgtctcataaattttatttttagactttttaaaaaaccgaaaaccgatccaatccaaaccgaaaataattggattggattggatcggatttgaaaaaaatttcaaaccgaatggatgatcaaatgaccaaaccgaaggaattggatcggatgattttttgcttcaaaaccgatccaatccagaccgcgaacacccctaccacccacgttacgtgttttttccatgaatgaggttcaaaattttaaaaatgaataaattcaatttctttatccaaacacaaaattttaaaaatataaaaattttaattgatacattttaatttccctaaattttaaattttctgaaattttaaaatacttaataatatgccactgctgatagtgtcaaacctataattaatatgccaccaaaaccaagcgaattttgtgagattgggtaatgaaaaagacttagaagtagggctcagagaaaagttcctcattcctgacagcgtcaaaacttgaatttgtatgtcactaagataaagcaaaatgaccaacaacaacgctgttggtataaatgatagcaaattgtattttttaatcatctgattcaatttccaacaaaaattatttcgtgcaaatataattataaaacataaataagataaagcaaaatgtaaggcaccagggagatgtgggtatcaatacctgcaacctcacaagaagtcagcgctatacaatgagctaaatccccattccccaacattattttacttcagctctatagtctcttctaatatttaacatttgattaaatactgttcatccagtttttgtcattttttatataaaaagaacaagttttgtaccttatttaatatgcttcttaagataatcggagggtaggttataggggtgttctgggataagttcatctttaatcctatttgacttgaaattttaatagagttatttattaatttgaactcgaacttgacctaattaatacttaaaatatatggaacaaatttgagttaatctgatttgtgattataatatagcaatattaacattatgtatatttttatgaatattatatattgtaaattataaaattttagactttggacttggttgtaattaatgaccgaagtacaattcaaactagtcctcaaaatacatcagattaacgttctaaacctaatgtctcaaaattaacttaatacggattagtggaatactggaatgggcagagctataaactaacattctaacaagttgatctgcgcgttcgatagctagctataacttttaactcacggaaaataatattgcaaactcttaaatttattagaactaatataataaacttagccatgcacaagtgttaactttacaatatataatttattttgattatgattttcatgtattttcaattatgttaaatttagtataattatatattataggatatgtatataaatattctaaaatatataaaaatcattatcaaaattaatacatattcaaataattttatatttacacatgtcttgctttatattaatttatgtaaacatttttttaaaattattatctttataagcatattcgcatttgcatatgacttatatatgcatatatatatatatatattatataattttaataagaagtattaataaaaatatatatattacattttgtaattattagtttatacccctatcatcataagggggaaaagtactgcattaattataaaaaagaaaaagagatttatgtgtatttatgtgaggaacatgtctaagagtgcagtctttaattaaataacatatttgtccaaaagtattaatactttgaatttataaccgccttgtctatactttttcaaacccattaacttataactttgttcttaatattttcccgcgagtccaagcgactcggctccatttaacttgcctttagttactggagtgtactaaatatcctatatatttttcttatatactatataggtacggtgtaattccaaacttatccttttattaagtttaattaaaaaaaatagtttgaaaaccgtacaggcatgtttcgtttggctttcttacaccattcttcttcccttcctgcactctaagacttccggagcatcgtgtactgaggtccttctccggtggcgttgatataggcagtggagctccattgttgcggcatcattggtggtagcactggtggtggaggtcgatttttgtggtttgtcgacgaaggtgagttttctagtgtggtggtggtgtcgtacggattggtcaatccgtgaggatgacacggattgaaggatccgtaagaagggtttatcctccatatggattacctgatccgtaagctccatacggattatctgatccgtatgaagtttacggattacatccgtaagcttcatacggattacctgatccgtatggaggttaaaaccttaaaagctgttttaaatttactaaaatatgattaaattatgtatataagcatgttgaaatttgaatgactgcatctggattggtatcgtaggggaattaaggtagtgtatgtgatatatacttgtttgtgatttatgtttatcattgacaatattacatgttgatattcaacgaaattagacatgttaatatgaaccatataataggatagttatagagttgaggtaaatgttaataaacctcgtccctgaattgctaaaatacctctgtttattgatttatttaatctaaaatgtcacttttttttttaaatgtaagttaccccctttgattgtgttctttaataatgccacacccctaatagtagaagccacaccaataagagtaaaagttattggcattgtgcaagtaatggtaagttgggagaggaatcaaagtaattattccaatccataaattgaagccttaagcataccgacttgaatattgtggacaacttggttaagagttattaataaattgaagcatactgagttgaatattgtggagaagttgggagaggaatcaaagtaatgataagttattaataaatgttatattttcattaagagtcaaaggaaatgaaagaaagtagatagatttatatgtaaccaatggtatgtatatatgtttgttatttgtttgttttaagtttatgactaacttggttaagaaatggtacaacttatggcaagaactagaggaggattgcgtcgggttgtagggacagacatgactggtgatgatgaacatgggggtcaacgtcgtaggccgacctcatccacgagaagacaacgggcagcggaggctgttgctgaggaacttgttcttcaggaaagagttgtggagccggaagatgtagtagtgaatgaggatgttgggaccaagtctgaatgcttcccaggtggtccagaagatacctcggttctaacagattatgctaaccatgtcgcactgagagtttgggctggagaggtaatgattaatgtgtttaactaaatatgtcgtaatagttatttttgtatgtatgagttgttacttaaatccattttttcaggagtgtgctgagttgaaactagcatctcatggacggaaagttgcaaaatttggcaaatcggcacctgagattgaagggatagtagctagtactgggttaagcccgttgatacgtacctttgtggagacaggtgacagaggactactttctgcattcgtggagcgatgacaccccaagaccagcagcttccacttgcccatcggagaagtcagcctaacgctggacgatgttgcggcgctgttgcatatcccaataatgggatccttccagacgtatgatccgattgacaccggggaggcaacatcaatactggtggacttgcttcaggttacagttgaagatgctgaagctgagtttgagcaatgccatagagcatatgttcggttgtcctggctccgcgagttatatgttgccaagtgtgctggaaggcattgggtagaagcagctagagcttatttcctgcacttagtcgactgtaccttgtttgcgaacaagagtgccacacatattagtgtggtattcttggatgcatttctagatctggaccagtcgaccgggtatgcatggggtgtagccggtctggtccacatgtacgagaatttaaactatgcatgccagcatcatgggaagcaccttgccggttacattactttgctacaagtaatttcaatatttgaattatgcaatacatgttaatataatttaactaagtgacaagcctcattacctgtggttattgtattaacaaatatgttattgccttttatgcagtgttggatctatgaacattttcctactattggaagtgtcataccagatccgaagttcgatgagaggtcccctcgagcatgtcgttggaaagctgcgaaggcattgccagtgtcaacctatcgcagacagttagataggtttacactggatgatgtatgctggatgcaatacagggatcattgtggccatagggatttcgagctaatttcactatttggtggatatgttagatggggtccatacatggttagacatcgaacagatcgagtactcagacaatttggttttgttcaacatataccgcagttggattagtcggagtctccgtcgatataacatgttgatgataggtggatgcacttctcctagtacctagtgaacactggcgatatggttacatatcccagccagtttgctcctggatatatggaatggtatcatcgtatatcgcacccatatatgttaccaccagaggttggggagccaagccgacatcatgtgcgctagccttcattggtcaccgatccacaccctgtctcccaggatgacacaccagcaaccgcttctaatgtcagtcacacagctccacatgcagtggtaaaaattagggacattttatttttaaaaagttaattgaagtcacgattgactattactgtttaatattgtgtgttttattgtaccagggtatgtgcgagaggctagtagacgggttgcaatacatgcttgacacccaacaagttattcctggcacggaggcatattcatctatgcaacacttgttgggattagcacgtagtgtgacaccgcatggaaatgtctttgtgtgcaccagtagattgagggaatcagttaggagacgagttggctgatttacacatttatatcagttgtgtttacaattaaattttaactttttatatttaaacagattggcagtggacttgttaatttataagaattgcatgaaacttgttataattgaatatacacttgttcaacacaaagtctttacaatagttttaacaaaatacacctaaaggaatttattctaaatcgacatattcagttggtaatttaacggaatctgagtacaacctcattcgatgaatgtatggtagtggccaaagtcgtgcctcattggaacagtgtgtagcccacaagaaagtagtgcatgggataggacagtcagatgttagttcaacctgtttcaaagacgattgttgttgtaaattcattttgacaaatgtcaataaaataagttgttaaataatggtgctagttgtacctggacaaaatggttaccatacacatgaccaatacaaacaatgcgatgaatagatggatctttaggaggttggcttctcagagggaaaaacatcatactttgttgcagagaaagagatacaacaatgacattataccttaaggcaatgacataacccatgtcggtgatatccatccacttatccatcgttacctacacaagcaaaatatattagtttacatatgtgcatctaaaaattcatacatacgttgctaaaagcatactgaaagtaaaggtcttacccttgctgatccatcaactagaagggactgccttaactgatcaaacctatcaaacccactaaacaatgctatgtattgattagaccattgtgaaagttctttaagcaaatgattgcggaccaaaggccaagaatcttcaccataacctagtacgacagcaatcacacgatatccacaattaccatcagctttaacatcagtgatgctaacaatgagcttctgcatgaaaggatgaaattgatctagcataggaatgtttctgttcttcattggtggatcagatgaggaagcagaccttttttgtgtggagcaactattttgcacagaatgtaattcatcaacatattcaaaataagacggatctcgcttggttgatcttttatatcttgtgtgtttatttttcggagcaccttttgttctcacctttttagggggaggattcatcgatgtttgatcaggaaaagcaatttctttaagcttagcttcatcgtcattttcccacacaggtcaagcttctgaaaacgattggagattgcctctatctcgtcagtgatgtgaatttccatgtcatcctaaccttggttggaaaaatttaaagttcgccaaaactggtgaatgcttgaaagcggtacgctgccaacaacaactttagctaactcacatgcacaagggagaccatgggtggttttcatgacacatccacaccgagcagggtttttgcctgcataatgaactcgctcaaactcagcaacaagatggttcaacgcatacctcgacaccatcccgataaatctcttgtacaatgttactttaaatacatgtccgatgatgtgggtgcttctttcaattgatgcctttatttcagtatgttgcaacgtgatcatgttgttcatggaatcctaaacagtacataagtctccaacgctattttgtagaaacctctttaaagtccaatgagcagactcaaccctgcatttagtgaaaaaatgttcatactttaaaaaaaaaataggttgttcaacaatggacaatgtcaccagctataagtattttcttacctgtttgttgtagtgttgcctagatgcattactttatttgtccaagcggtaacaaatttttccttatggggatccaaccatgtttctttcacataatcaacaaatgcagaccatggtgcacatgcaacttcaaacttcttcaaacattcattataagctttctcagtaccacaatcaataagagtcccccaagcttccatcacaaagtcccatgccaaattttggcgtatgtaagttttacactttgccttgacattcttgtcaatgtgaaaccgacacaataagttggttgacattggaaaacaattttgacagcagtcatcaatgctgcatctctatcggttacaatgacttttgggaaaaattctctttttagaaaaatccctctaaagcgttcaagggtccacacaagattgtttgtccactccgcctctaaataggcaaatgcagcataaaatgtcataccagtaggtgtcacaccaactatgtcaagtaaagtaagtctgtacctgtttgttttgtatgtactgtctatcaagaaaaccacataatattcattgctcaatttcactaagtatggatgtgtccaaaataagtcacgtaccacattttcttctttcattctatgccaatgaatatatatgtcgcgttcaagaagcttcattaactgttgcatttcactgttatcacctcttatttgcgtgcggtatgtataccttgcattgtacacttgcttcaaagttgtataattattggcattttgctccttcaaagttaaaagaatgttctttggctttaccatcgaccttgtcatatcagcaacaatgatcttctcctcctcagttagccgaccagcaaacgcgtgtccacataatgatctagccaaactatgattatgcatgccacatattaatttcactacccacccttcacctcctagcccgagttttgctctcagcttaaacggacattcacgttttctactgctatccattgtaggtacaaaacctttcttgaatgatttatactttccactcctttgacaaccaattatcacatacgatgttgttcctagttttccagttgccatgccactcctcattatgacaactacaaaaccattatcaaatgcaacacttcgagcccatttcaatacatcctcacgggaaacaaacacctacaaaaatggaaaattcatggttgggtattatcatttgtatacttaaactcaatcattacactactttaactacatggggaaatcatatatatacctcgtcggtattgaatgcttccgaacaatcaactgaacaattaacattttcaaacgcatcagcttcttcaccaatgtcttcctccatattaatttcttcagacataatactatcataaatccactcgtcgttgtccatcttaacaaataaaattattattttttcattttcactacatacacataataatattaaaaaacatacacatttataggcataaaaaacacctaactcttttattttaactaataaaaaacaaaattctttctaaaattaaattacaaatttttagaaaaaaaatttaagcctcatacaaattaatcaatctgtacagtttacacgaattagtcaatccgtaagactcatacagattagtcaatccataaagatcatacggattagtcaatccgtatgaagcttacagattgtgtaatctgtaatcctcatacggattgacaaatccgtacgcagtaagtcactttgctcttacggattacttaatctgtaactcccatatagattacgtaatccgtacctaagaaaaaataagttcagccttcttaccttgcccccatcgcccacgatggcctctccaacgactgtcaccgccaaacgccactatcaccacccccaactacctcctccaacaacaacaactccaatgcacaaccacaacatgatcaagtgagcaaacaccaatagcaaacaccaacaacaaaccaaggagagagaaacaccatatgtatttgcttcaagggcactattggcattttaaaaaattcatatattgtataagaaaagtatatagtgtatttagtagaatccttcgttagtccccactctagacttgtgtttaaagtttagacttcaaaggttacaagtctattttttattaattgccaatatttatgttccttttcttgtgcttaagacatgtcatgtcaagtgatgattttctgagtccttttcttcttttactggttcttttttttttggacttcttttctgtttttttttgttcaagcataaagttctttttttgaacaaggactacaataccatatttgaattagtgcgctaacacctactcaaaagtgtgaagaaacatactgaggaaactattgttttagtacatgttagaaaaaaaaacatctaactatccaaaatgcatattattaaacatattagttttaaaaaatagagattatatttattcaatctgttaaaaaagattgaaaaataaaaaatatacataattcaaactagaagtttcaaaagtagaattaaactaaaataaacatcaaaacaagatagagctcaactttgctctctagacaacctcatattttaggtattttaaataatatttacatttaaaaacaataaactatatactttctctccctttgctataaacaagtatttaacacaatttgtgaggagagaaatttttttatattgcatgctaaccataaagtgtgtttagatatgtaggattttgaggtaagaattcaatttttaagagaaactaaaataccatgtatcaaaatgagttgtttgactattaaattcaattttatagcaaattttagaagtcttccttaaggtttgctctatttatatatgtcttttctccttttaaaatcattacattaacacctccagttgtaatgatgttgagtttatatttgaaaattaaaagatacagtaatttttaattctttttaggaaaaatcggaattgtccttgacttttaagtgatccaaacacagagaaatagaattgtgcaaggtcttcttctttcttctctgcgcagccaaagggagccacattcatcaccgtcatgcaacatgtctcctccatgcttctcctttgtgtgtctcctctaggtggtgctaggcacgtttctcctctgtggttgtggtgcaaaaagggttctcctttgcagtggtgataggtaagctcttctccctcgtcaccatcatgccttgttgtatcctctgcgtttctgttcacatattgtggtggtgatatgtgttgcacgtttctactccacctcttattctccttcacggttctgtttgcatcttgtgggggcacatgtattccttgatgttttaaagatgttacacatgtaccccttgatgttgtaaaatttttacacacgcacctcttgtcttttgcaataacacatgtaccaccatgaatattaacccacgaaaacaaactagcaccagcttcaccacactcagcaacaacatgaactcgtaaacattcaaaaatggtgtgctaaaaataggagttttaaacaaaggaaggagatgaggataatttcgggattagatttttaataaaagtcatgtgcataccatgtgatgtaaaaaataaatagttaacacctttaacgatggagggggtacaagtgtaccgggatcacaagttagagagttttatgttttatgtagtgtcaaaaaaggaagggaggcatgtgcaaatagtggatacctcagatttttttttttgcaatttatttttttttaaaataaagtgaagaaattttaaataacacatacaaaacaattgaaagatctttttcttttccacaatattcattttgaaactttgacgcactttctttctcatcctccattttccccccttcatacctttctttctctattttcacaccacacgtatttctcttatccatccttatgaccttctcttccacacccctctttgtcctttgtgcttaacttttcatatccgtcttactaagatgaagtaattttgtgaacattacctttggttcttttctaagtgaagtcaatggaaatcggaagaggctttgttatccaaaaatacttgggtttcaaatttagagagacttgtgtgaaattaatacttgaaaagtttattggagaagcatataagaagaatagttgtttagcttgaagaggcattagttaaataatacttgtaatagtcttatttgtcagtggaaaccttggttgtgtattaaggactggatgtgatattggattaagacaaaccaatataaaaattcttttttatatatttgtctctcctttatctactttataattttcttaagttatttaaagaaagatagttgtttcatccttaattgtgtttgaacttattaaacaattttgtcttatctagcaaacttatagagtcatatgtaagactaaatagttttttttttttttttgaaaaggatttgtgaaaatattttaaaacacaattcaatcacttttcttgtgttttcttgtatcttatagtaatcaccaatcaataaaagtatattcataatgacttagtgtttttcacccttcattagcacacaaccctaccttgtaatggaagaacattgacattaattctacaatcgcttatgaaaatccttttaacttgataatttaggacatcttacatgcttgacctttcaagctgactacgtgcatcgtaaagacataggttgattggccaacttttacatcattagatatcctttatgacctttgacaatgttccatgtagaccacgtgcatcgaaaagacataacaacttttgtaccaaaaatactcatatataagggcaattttcctacaatgtatggacctaatcctctttgttacacttcacatcttctctaactaacttgagaattgggttccttacaagtgggcgccacagatctcatcatcattgcattgagtccttcctccttcatgctcagaccattggaattcatcctcaattgtacatgtgttcacccttagttggcaagccagacatagcgttgtttatggctatttttttttgtattgatggacactataactaattgtaggcttgtgactctatagacgcttgcaacgattgtgttgctatcttagtcttcttctcattgtgatggtgtagaatctttggccactccaaacgatccactttaggaccaagttccactttctactccccctattgcatcattcgttgtcaaactcactatgatcctctagtaatttaagaaaactctataacaacaacaacaacaacaacaataactatagaagaccttattacgaagtacgataaggtgcaccatcatagcgccattatagaacccctaaccattatgcttgctctaaagtttagtctcttaatgtggatgcactcatcaagtatccctcctcacctaacatattttaaattcaaaattatagcaataattttgagcctcacataattatcaacaacaattgaagcattttccattcacagtgtgacatatttttgttggagttgatgtacctagtcctgagaatgatgctagagatggtgcaaatcaacttgtggatgaattcatggaggaagctactgaatgaaatgaagatgctgagagtgaagataatgaggagtttgataagaatgatggggagtttagtgaggatgatgaggagtctagtgaggaagaggatgatggtagtagcagtgatggttctgaggagcaggaagatctacctactaatatcgcttcatcagagaggggaattagtttttccttatctttctttctcctttttttattgctatctatttgctgttttactacatacctggcatggttactgttggtttccttttcagacttcagttggtgttttctattttagtatgttggtaccgagttggcattttctttattttgtgtaaatgctttgttgctgttctttgtggtgattttcagtataaaacaattgttgattgtataatgaatttgatgattatttagaatgtgattatataaaaaatttaaagttcctagagtgacataattaatttgatcattatttagaatgtgaaggtactctcaattttcaatatctacaacatgaagtggatgaaataggaaggacttatttaaaatgaggaaaccttaaagagtaatataacactttaaggtaattttaaacaagtattttaatattatgttttgatcaactttgtgtttacattacaacttaaattttaaatatgtattattatattagatgttagcttggttcatccctttttttctagttcattttgaaactccggatactccccgagcatcaattttacttcccattattcgtacaaagttccattggcattttctttaaactttgcatagttgcactgaatctagaaaagttttgagttgaagggttcaagccttggtggaggaggttgatgtgctggtgcatgtgggatcacctcttgagcaagttgaaaggcttaaaaggaggatggacccttcctaataactcttagaaatttgagaggaagatggtccctttttaaaacttctttcttattcctagtagaatccatagtggttggcctaggaggtgtcatcctggaaaataaacgaaacaacaagacatggcaactacatagttagtttacaacaaaattgaaatacaaaaaagtgtcatacaaataaagttcatgacatgaaaaaagatgtagaaaaacaaaaatgatgaacacaaacacaaatattatacaaaaagagaaaacaaaatacactaaacataattataagtaaaaaaaaggaaatataattaatagaaaagacgtgtatctttgctaaaccttttagcttgaagcaaaagttgcaaatatttttctttgtatgagtttctacttagccaaaaattcttgcttcaatccaaaaatctaacagaaaaatgcataatgaataagaagataaagaatttttttttagaagaaaacaacacttaatcacaacaacacatgagtttcaaatttcacagcaaaaagacaaagaaataaacaaaggagaaaatcatacaaagactcatggtggtccccaaaacaacaacaatgaataaataaatatcacatgcagatggaccaaaattggtcctaagacctcaaaaagcatgaagttgaagactatgcagagaagattttggaacttagactatcaatggttgataattgtcttttaaaccttgtttttgtgggcaattactctttcattttgttgcattttgtgtaaaaacccttgtgtttatgaataaatttttataaaaccgtttttagaaaataaaaatagaatttctaatgtttttatatgatttagatgttacaaaggctcaaatgaagaaaggcaaataaaccaaaataatatttttttaattaaatatttatcaaaaaggtgcaatttggaaaataattacaaaactgggactgtcaaacatgcctagattgggcgtgttcttgctggtgctgccacgtggcagccaggtggcaggcttaggtgcagcgcggtattttcgtaaacttcggaaggtcataacttttgactgtgacgttcgattgatgtgaaatcgttggccacgcgctcgaaattgagaggagtaggcctgggttgggaacttgcctaaaattatttttccaaaataggcctctaagtgcttcaaaattgcgatttaatcttcggagccccaaaaaaaactttgttttctgatattttatctacttaattagtgaattgcaagctattctttatttatctaattacttctgttaatttcgagcgttttgacataaaatacatcagcatcggacattgttacgagaaattacgactgttaaaatttatatgcatcgtcgatattatagtctaattttgctcaattttttagattatttttgcaaccacaacgttttcatttttaaggatttatggattaggtttcgggtttagggttatggtttagggtttacgatttagggtttatgctttatggtttagtggtttagggtttagtggtttggggtttagtgtttaggggtttaggggttaggggttatggtttagggtttatggtttagggtttagggtttagggctttggattaattaaccctaaacactaaaccattaaaccctaacgcatagaccctaaaccatacaccctaacccataaccctaaacccgaaacctaatccataaatcctaaaaaatgaaaacgttgtggttgcaaaaataatttaaaaaattgagcaaaattagactataatatcgacgatgcatataactttgaacagtcgtaatttctcgtaacaatgttcgatgatgacgtattttatgtcacccaaatcgtccacactaacaatccacccttctcccccaaaaggcgattttattaagagaagtaattagataaataaagaatatcttgcaattcactaattgagtagataaaatatccgaaaacaaaaaaatttttggggctctgaagattaaattgcaattttgaagcacttagaggcctcttttgggaaaatgttttgggcaagttcccaacccaggccttctcctctcaatctcgagcgcgtggccaccaatttcacatcaatcggacgtcccagtcaaaagttatgaccttccgaagtttatgaaaacactgcgttgcacctaagcctgccacctagctgccatgtggcagcaccagcaaggacacgcccagattgggcatgatgtaacacgcccaatccaggcgtgtttgatagccccagttttgtaattattttccaaattacacctttttggtaaatatttaattaaaaaaaatattattttggtttatttgccaatgaagaaaagctaaaagaggagctgcagacttcaacttgccacgacgagtgacggaaatgtcacaacgagaaaggactaaatatcaagtgaaagattgtgaagactcaccacaacgaatctacaccttgccacaacgaatccttaccttcagacctaggttactagtggaaattcgtcacagctagtgtcaccctcaccaaagtgagatgagggccgaaaaggaggaagctttaatgaaagtgtccttattgtacttcaaacataataggcaagtgaatctagtctaattgtagaaagaagtaataagtaatgagtaatcatatgcacaaagacaatgtgctatgtaaagggagttaacaaacaatttttacacacattcattgcagtgagttgtaaattcaatgtggcaaatgagttaagttttagtttttagaaacaaaggtttcattgtactaatgcataaattttctatggtgaaactaaaatacttttggttttcaaacacaatttttgagcgaaaattaaatcaaacatagaaaaatgttgttgagatgaaatacatagaattcttcatatgaatctcattcctaatcaatcttttagttcaatgcaatcaagatccaaactatgatgactaatcctaattccttagtgattaatgtttgagttccaagccaaatttgtaattccttaggtgatttagaccttgaaacacatatctagatcaatgagtctctacaaatgcaagtatttaatccattcctgaaattaaagccttgcacaattttaattcagatctagaatttgaaattgtttccacacaatccaaatccctaaaagttaggttgatcactcctaacatgcatctaagtatagaactaaaataagatcatattaaatacgagaattgattagaaaataagagattacatacttgaattctatttcaatcactcaccaactgtgaaatttagctcatttggatcatgaaggatccaaatagaacttcagaagagcaacaatggaggaaaaaggagagggaaaggagaaaatagagagaagagagagaattcaagattatatttcttagagttcacaaatgaaccaaaagtctatacaaaggatgttataaggtttttatgtagagctgagattgcattatttttttgtgccttagaggacccttgcttcaatgaaaaaaaaattacacttatgaagtaagaactctgcacttgatcttcatgcctttggaccttattcattgggacgaataggtaactcgttatggcgaatttctcataattccaagttctttagctttgtagatttgttgtggtgaatctttgtcagtttcagctgatcaaagcaaaaacttatcttgttgtggcaagattatgtctgcaactcttcattctttgatgatcaaaatatgctcttgtaacatctaaatttacatcaaaatatcaaaaactatattttttagtttctaaaaccagtttatacaatttattaacaaaataattatgtacaaaagttaaagaaaagctaaaagataatttttcacaaaataagatgcgaaaaacaattatcagtcctttgcaagatttgaggagttgctgtagcaaatggtcaatgtgtaaaaaaaaacaaaacaaaattgtgtggctcttacaaatatccttgtagtagattaatgggaaggttttttttatttttttttattttttacttttggtaaatttgaagatcaaagcaggacgttctttctctttttctctctttctcattcttccccaattttccttctgtgcaagtttgcatattcttcatttcacttccatggattccatcttagccatgtgtaattgaatttgaagtttctggaataaaacgaagtagattcagagtatgtgattgtaaatgtctattctcttaattgtgcaatgcttttctacttctatgcttaaatttcatgcttaggcttgatcaacctagctttatggagttggattgtgctggaatttttttttattctagatctgaagtagagatgtgcatgaatctagttttaggaatgagattaggtttttgcatttcaaagactctctaatttctttctaatttctatgttaagttacctaagggattaggttctaatttaggaatcttatcatctacctaaagaatatttgattacttgagtttgagtcttggttgcttgaaattgagatttagaattcaggtcacaaacgatgaactctatggagtttttatctagaaatagtgtttctcaccattttttcttgttttcgtgcttattctactttgaaaatctaaaaaacatttttaatttgctatagtgattagttgttttgctacaatgaaattctcttttgaaaaattaacaaaagtcgctctttcgcaacggtgaattatcaaaattgaaaactaattgcaacaaaatttcccttgttttagttttacttttattttagatagtattaattgttcaatttcctaagtattaaaacaagtttttgtggatacgatactcaatactttcgtttcattaccacacttagactggattcacttgtctagaccttgagtcttcaacaatggttcacaaaacataaaagaaaatgagacaagaaattcacatgttgaattaatcaaacgcttgcaacacaatgaaaatattataaataaaagcattacagcacaagtgggttctaccttttaaatgaaacagagaacacccgcaacaaaacatcatgtgaatatcaaaacttaaataatagaaaagggtaaaaaaaaagtcaacacaggaagctattaatggttccaagaaagacaacacaaaaatacataaatacaacacaaataaactattggaacatggaagttccagaacttgacgctaaagaggaaagatgtaggcacatgcacaaagcaaaatctaccacacaataaaagctattatagaacaaaagcaaatcagtatatgtgtgtgccattcttttcaacgaagaaggcatatactagtaaaacccatgaaaataaaatatcaccatcataagaaaaaagattgactacgatgcacactcacttaacaatacacactactacaacaaacacaaacaaagtcggtcattatacacatacaaagtcggttatacaaccgactttgtctcagccgtcgttgaaaggaggattcaaacaacgtcggttctctagagaccgtctttgaatggaatttttttatttttttttaatggcaacttcaaagacggttattaaaataactgacttagaaaggccgggcagcaggcacattttaagtcggttcttttaaagaactgactttgaaaggctgggcagcatacacattttaagtcggttcttttaaagaaccgactttgaaaggctgggcaggcacattttaagtcggtttttttaaagaaccgacttaaaatgatgatacatacaaaacaaccctggaaataaaaatatcggctttgccaatttcagtatgataaatcaaatcaacccaattcccacaaaaaggaccacaagcatgtgaatcttgtacaagaacaataggaaatcaatgtttagcaatcaatttccttaatgttatgagacaatctcttaaaacattagtactcatgaactcaagcaaggagcgggtataatttattttttttccttatagaagtatgaactgaaattcaaacaccttcacttgatgtaccagtgaaacattcatgatatgagaaacaatcactctgtcagaaaaggtaagtgtattggcatctatattttgtaaaattagcttcgagaaagtgaccaataatcactcacattttttataactaaagaatttcaagctccataaatttctccataagcacttgcaagagaaaaattagggaagtaaaatgaattaaatttctcccataagttaaaatcaaattatgcactttcttttttagacaagatagatgagaaagctgctaaagatagttaaggtatataagttggttctaatttatgagaaaaatttgatttattttacatccttatctattatcttgtaaatgcttgtgcagaattttatccaaattgggctactaacaaattgcatttccaggaccactagtttgtctcttttttaaatccaaactcaccaaaccactcaaaacttcaaactctaaagtcagtcccatcaattaatttatccagatgtgattcatgaacataagtaatgccctagtaacccatagtttgcagaaaattcatggcttagtaacaacatagttggacttgtatacacttagcagaaacagatcttccaagttatttaaattcaaatttgctgatcaattatgctacaggaatacaaatccatttataaacatctacaactagagaattcacatatgtatttcatatgaacaaagataatcacacaaaaattattaaaaccgattgcatttaagcaacaaacaagaaaagggatagaagcaaatatagggattagagaaacgtcaagcatccaacatgttacaatctcttaatatatattactgcagaaaataggcattgattgttgttgaatagccaacatacatcttaattctttaaatgactctagatttgataagcagattgaatttggctactaaactagacagagtgacagacccattcttaacaactgaaatatagatttctagctgcacagacaaagctgaaacattggagaactttacttttgtccccttactgttgtcatataatctagtaagattaaaaacataactttgaatcatgaggggatttacttcagaaagatctcatcttatggagtaattaacaatcaacaaaatgaaagaacagggagataatgaactaacctcaagagcaggcccaaccttaaaggtccccatgatcttctctttggagaccaatgtgaggaggggaattagagcaaagggaatttgcatggactgaagcacattgagccattcattcaaaacatccaatgagccttctgatctattaaaaacaatcgctacaattatagttggcacaattgcaaaacttcgagtgatcaacgctctcaaccatttctttaaacgaaggttgaggaaaccccccattatgaattggccagcatatgtgccagtgatggtgctactctgcccagctgccaatacattgtgaggcataatgacataacccacaacacccacagcctgacgaattgttttcaagcttagtcttggaaccaaaatacctaacacaaggaacaaacaaagttatattttatacccatgttattaagggctacatatatttttatttctgaaataccaaacagatgaaccacacagaaaagtgattgatattttatacccatgttattaagggctacatatatttctggagtctggacatagaatacaaatagaacacgactaaaatcaaacaagcattcaaaactttctgacagatatgtaactcttttaattatataagaaacatagaaaggctgccatacaatacaagtaataaagtgtccaaatgtgatcatccagctctggtttggttctttaacttcctttaattgttgaaggccataacaagcaactatgaggttaagcttcaagggaaatcactcaaaactgctgaataagctgtccatctactcattaatcttacccaggacgaaagaaagacatgtttacaaacaattatttaatggaaagttccctctgagtagaagcttgtaatttgtcaaggggataggtttaccttgtaacacagcaatttgataatgcttgtcatgtgacctataacgcagcaaattaagaataatacatttgaataaaatgcaattagaatgaagcaagttgaaagcgtaccttgaaagcaacatagttcttggaattattgaggaccttaagatcgcaaaatgtttgcttctccaattcaactggttgcagttacaggaatatcatgagaataaataactaaataaacatacaccgtggatattcataatagatgaaagcatatttgataatgctgaagagaatccaatgaatatgtccgttacaatagatttagtatcgagagctttgtcatgtgtaatgaattgtttttgttccaattaattaaagggaaacgacgaatgaattaagaatataaatgaacaggtagaggagttaggtaacgtacaatggaagaggagttcgtcgggactaacggagatgagttgaagaggcagtcatcaagaatgcatgaactgaagaaagctggtatatctgaaacaagagtcctgcatttatgatgataatatatgttagtttatgaatacacacacacacacacacacacacacacacatatatatatatatatgggggggcagggataattgatatacatacctggtaacttgttcactgtagaaagtatctgcccttggctgcaagcattcaaaaccccaacaaatgttattccatttggcctaaccctctccttaagctagcatgtcactaaacaactcaactgcctcaatgctcttcccatgcaaagccaatcccccaatgatggaattataagtagacacatgtttcaccctcaccccatcaaacaatgcttgtgcctcatcaatgtcaccacacctcgaatacatgttgatcaacgcaccggcaacaaaccagttaacctcaacaccatacttgggcatgtatgcatgaattcatcgaccgagctccaaagctcccaactgtgcacacgcggacaagagacaaacaaacgtaacctcattaggctccacagccttcacttgcatctgcctgaacacctccaaacccctattgaactccccattcctcaccaacctttggtatcaccattgtccaacacactgtatcctgagtccccatctcattgaacactccaatagcctcctcaaccatcccacaatcaaaacatgaaccaatcataacagtacatgcgaccacatctcgttcaggcattccatcaaacatctttctcgcatcctccaataccccacacatcccatacaactcaaccaacttcaacgcaatggacctatccaaacccaacccacatttcaaaacaagcccatgaacctctttccacttcccaaagcacgttgaagcacacatgctttcaacaccgcagtgactgcatagttatcagccaaaacatgcttctgaaccatttggcaaaacaagttgatggcatcagtgtaagagccaaatacatacctccaagttcaaccgagtttctaaggattgagctacaacttgcgttccatccaacaagaaccctagctccctgacctcgtacaccttcagttgcggcggacagatgccggaaccaatgtttaactcgccgtcggaagtgacgttgatttaggtggccgtggcggtgaagcgacggtcttcaagagcaccttctgtgtctaacctcaaaacaaagatttccaagattgaaacgctttcttcgtgacgagctctgcaatgggggttacagatttttgaaaaaggggcgcagagaaaggggttcctaaattgatttgtttcattttaaaaagcatcaaagtcgttttttatcaaaaccgactttgaatcatggaaaacaacgacggtcatcatataaaccgacgtcgttcttgtattaatgctgaaataattacaaaattgtcaccggttactacaacgacgagttctaaacaaccgacgtcgactgcctgacgtagaatatgccttgtgtagtagtgacaaaaactacaaaccacaacaataataaaggaataaaatgaaattgtatgcgatttgaaaagaaaaatcttcagaaaaccctcctctgccacagtcgagaatggaaaaaagggtgggtaaagtggaagaagggggaaaattatttaaaaagtgacacattagtggaaaacattaggaaagtgaaaaattgtgtgagagaaaacaatttttgaaaaattaaatttgagagagaaaatttaaaattagatttgtggcttagccagaaatttcagcttgaagttaaaattataaaatacaacctttttttttatctcgttttctctctcatgccttatttatactcaccaatctcttatagagaaatcaaaagtgtattatattttggtcctaacataaacctactttaagatgtattaattgctagttttttttttacccttcatttattaaaattcactaatgaggcacatactgatttctcatgcatttgttgatctactaacaatataacataacactttcagtaaaaaaaaataaatacaagttacactaattggcggaggtgtaatgtcattaaatgcaactattactttaaccaattatttaaaagggtatatgtttggaataaaattaaaatttatggcattattaattaaaaataactaacttaactattttattgatcttaaagaatttgttatttgtttcttatataaaattggaggaagtatattgcttgaagctatacattttatagcttaggcgaaaataaattttcaaaataatttcacttggcatggagctaaaatctgtggctaagaaaaaagaaaatcaacttgttttcttcactctcaagggtaaattcacttaaagattaacagtttggcaaagccaaaaatatgacatttatttgaattattttcgcttgaagctaaaactcacaacgcaacaaaatgttttaatatttttctcatcactcccaggggttttgtagcttgaagctaaaatgtgcggctaagccaaaaatttggcagagagcattttgaggattttttgcttggagcaaaactaacgacttagccaaaataacttcaaaatttttcatcactccaagggattttctagctagcttgaagctaaaatgtgaaaataagccaaaaacctgaggggtcttgttctgtgataaacaaatgactccaaacaagaacgtcatggtagccaatcctaagaaaatatataagtgaacctgaagcagtaatagtaagcgttcaagtgctggtgttatgaccttttttccacctttttttaatcaaatgatttagtgctctcagaaagtggatcaaaggcttcctattcaacgaattcaaattattctactttagacaaaaatgttttgacttaatcacactaacaacattaaaattctctgtaactactttgtttattactgccaaatccgcctgatcagccaataagccaaaaatttgacagcaacaaattattgatgactttgaactaaatagtaaaacaacactatacctatgcatgattcacaccaacaaaaacacatttttcttggacaaattggtgttattttctttttcttttcttgaaccagataatggatcaaacctaagggtgagcaaatgacgagttgggacaagtttatctttttccttgcttgacatgaaattttatcaagtcattttttttttaactcaaaccctaactcaatcacaactcaaaatatatgggacaaaattgggtcaacttgactattgaatgtaaaatatcaatcttaatactatttataattatgtcataaaatataagaaatataaaacttaaattaaggcatattttaaaataaataatatcaatataattataatatcatgttatacaaaacattttctataaacaaaaaatattgatacgtaattattcaaaaaacttttatttttaagagaatgtatgaaaaatatgtttcccagtaagtactttaattttatccaaacttggtcttagtccctatatttgatgaatttggttctccaactttataaaaacatccagatttggtccctgccctttaatggtgttagtgttgctaatggagtccacattaaggtagtttgaagtacaaattttgacagatataaactgtcaaaaacatgcactcatggatttggattttcggcattcatgcaatcatgcagtcatgaatcttaaccttcaattattttctcaacttctatacggaattggatttgctacattcacgcaatcacgcagttgcaaatctggactgttaaatgaagatttgtttatattttggctggttattttaagtctaagctatgagttaaatatgatccgtctgatcttcatcaaacattcaccattagttgactatgtgaatgcgtcaaagtttcaactgcaaattctatacaattaataaaataaaagaataattttagccaccgaatcttgcccaacgtgactgcatgcacgaagcctaactacaagaaattcagatccctcaaaacattggcaaggtcgctcacaggcttcatagcactgaggctagaggtggtgatgcacacgctggggcagctagaggagcacgtgtagcccatagtggcgaatacattgctatatttatggtgcatgcaccacttcaataccaagattgagtgtggttggaaatgtggtttatgagaagatggagggttgagttgatttgagaggcatgtagatttggtttcttaatgcatctcaaattgcatgttttggatgtgattcaagtgatacccaatgcattgcatcttagaggtggaaatctaagatctgattagaaacctacatcatcgcactgttggatatggctcatcttttgcagtcagatgacaacccttcttgttggcagggtcagcagaaagccaactgggggtccgggaaagccgccccggtgggggtccgggaggcagcacccccaggcccgtagaggctaggtactgttgtgggcctctgattatttgtaatattttacttttattagtagtttgggctagggcccatgaatagctactgttagggtttcttttaatcctatttatattccccttgtaaaccgtgtgacttgtaacgagtggcggtgaggtgattataatacagacaagctggacgtagcctacattgggtgaaccagggtaaactactgtgtcatatctctcttccctattctcttttctgttttttagatttgtgtgtgattgtcgatttccaacacgcacatcgggtgtttgttaaaaacttcataatgatcatgcttttcattgttcctttagcttccatgtgattgagaaatagatagaatgcaaagttaaaaaaatcatctgttaaattataatttgggagttttacttcaatttttgctcttgcttgctagaaatcaagaagaacaagttgtttgggatgtggaaatatgaaattttggtagctctggtgtgatcactttgtagcagcttaaaacctctagtaaatgctaatcatgttttggggtttaaatttactatagatactatattttaaaatgacaacaaattcagtaatttcttatagttgggggaccaaattcattgatttgaaagtataacaacaaataccaagtttactgaaagtacaaaaaataaaacacatgttttctgagaatgtaatacaccaaatcaagctaggaagaggtctttttagatgctttgtgttagtgccttcaacctttagtgggtgttgtgtgagatctttatttgaccgttgagccacccccttgggccttgtattgggtttgggcctcctggctctttcaatgttatgaaatattgataaaaatgtgtttgaactttggacaaattgtttgaaattgtgattttagttggtaaaattaattttgttttcatcaattgatatacattattgatagtccaattgccgttgatacttgaaatgataactatctcgacttgattattttttattgaccttaaccgaaacattttttaaagatgttcgtcaaggcaattttcggctaaccttagtcagagtcgtttttggccaaccttgactgcgactattttcaatcaacctcaactaaggctatttttgggtgacctcggttaaagttgtttttggttgacctcgatcatgactatttttagcctaccttggttgggggcgttttgactgacttcaactagggttgtttttgaccaacattgactaggattatttttgactaacttcagccatggttgtcttttgttgaccttgacaacgattattttctattgacgtctatttttggccgaccttgatcgaggttgtttttggtcaaccttggcaaaactctttttggctgacctcaattaggcttattttctgtcgacctcgaccaaggttgtttttggttgacctcgacgtgcctctttttggttgatcgaacgaaggttaatttcaaccaaccttgactagggttatttttggttgaccttgaccaaggttattttttactaacctcgactgaggttaattttggcctatctcgcccaaggctattttcagctgacctagtgtatggttaagttcagccaacctcagttagggttatttttggcctacctaggccaaggctattttcggctaactttgactagggttaactttggctaatctcagccgagactgtttttggccaacttcttctacggttaattttggccaacttttgttagggttattttttgccgacctcgaccaaggttatttttaatcgttcttagctaggactatttttggctaaccttaactagggttagttttgtcctagctcgaccatgattatttttggccgacctagtctatttttaatttcgacctactttaattaagtttgtttttggccaaccccaactgagactttttatgtcgatcatgattaaggttcattttggttgatatcagccaaggctatttttggtcatccttggtcagcgtttttttcaaccaacctctaccaaggatttttttggcaagcttcgtttacgattaattttggccaactttggctagaggtttttttgggcgacctacgtcagggttgttttgaccgaccttggctgaggctattttttggctgaccttatttggggttgattttgactgaccttgacttgagtattaaaaagtatgtctaaatattaaacttaggacccacgggtcatccctagccctatgggctttttgggctttttagcccttttggatttttaatacgagcctcttggtcttgtaggccttttgaaccttgacctgcacttcaagaaataaggctcaatgcctagatgcttgtgagcaagttgttaagaacccatggatcaaagatatgaagatcaaattgataagagagataaaaatcatattgatacccaaggggtaacatattaaattgattgaaaaagatactaaaatgaatgaccatttttctatttatagagtttataaattgggctaaccatgtataactaatttcttaacaaactaacaaattttatactctaatacaagtgccttaactaagcacattaatttgggcttcaacacccccatttggagattttgttgtgttctttgtccacctgcgctttaagtgcaccctagatgtgctcaacacatactatagtgagagagcactatattttaactatttttgcacgcaaacaactattcccactacctaaattgttattggtactaccaaccataaaaatttgaccattctacccttctttttttttcctacatccccaacctttctcccttcctctctcactttccctcttcctctttcataacacacccaaccctctcccttgctctctcatttcttcatcacttttccatctcttctctattccctctcatctcccttagactacccaacgtggtaatcttttttcttcacacaacatgtttctgttgttattttttattttgcaaatcaatttataaaatgaaaacgtgttttccttgtgtaggtatacaacggaaacatgtttccatttcgtaaaagtgcataaaaaataacaacggaaaacattggtagttatacaacgaaaacatgtttatgttgagaaaatgggggatggaaaaaaaaaccataacgaaaatacgtttccattttttactactaatgtacaacgaaaatgtgtttctattgtgcaattgggggtgaaaaaaatacacaatgaaagtacactttgttgtgcacttgcacgacaaaaatgtacttttgttgtatattttttttcaccttctaattgcacaatgaaaacatgtttctgttgtgcaatttataataggacagttttagaatatgggtaaaaagtaaacacatgaatagtgccatgaacaaaagtaagtagtgccaacaacaattcccttttttcacatttctcttgtacttgagctgccataggcctaatttgtgtttaaactctgattactaaggggatctagctggttgagtattatgtgtgaattattgtaaattctatgatacttgaatttgattcttatggacaaaaaaaattcagattaggacttttaagttggttacctagatgctagatataaataccatcgcaaacccattcgtaatctctgtttgacgttatatgagattaacattttcttatccaacgatttaaggacttctcctttgaaggttcttgagttgagttgaatgaaaatatagagactaaacatgtttttttctttataatttataggttcagtttgattatttttcaagttcattttattttattctcctacaattattattgaaaacctttttcaaattggttataaattcagttcaagtttcaccgaatcaatcataatgaattatgaccaaaatggattgttaatataatttgaataacacatggagacagcctctcttagattagttgaacagttgaacttttccttcagcagggtattactgttgttagaattagaaagagttgctaattttcatttgaacaaatgtagcttgcaaatcatattctattcactagtttcctttacactatgcatgtataaacacaagaaagtgagacacggaagaaaaagaagaaaacaaaaggttcatgagtactaagctgttgtttctatcttgttccttctagtagctcttatataacagaaaactgacactaaaaatgtggctgcaagccctgcaagaatgactcctgctccagcaatggacttggggtggtggtggtggtgcttcaacaaatggacctggccatgatgagaacccaaaaccgcttcatcatgtggttcaatagaagttctctgatgactaggaatgctcccatcagaaatagagtgcatattcttttcactttgtggtgcttcagatggagtaggacttttaatgtcagaggacctgatttggttatgttggtgcttaccaagtttacttccaatagagggttctgatgtgtgtggtctttggccaatagaaggactctgagcaggagggtttgtagatggtgctgaaagagattggaaaatgatttgaggttggtttctagcattggttagactcaaaagggtatttgctaaaagaaagaacaagaaaagaaacttggccatcattgttttagatttctgaaggtattgtgcttgaggctatggagaggttggttatatagcttgtgcattatatattgagatcctacaatcgtgtggcttggctgaaatttcctactgttagattctgacaaataatttattttcaattcatttttatgttttctgaggagttgtctgagagacaggagaaattaagttacatgtggaggcattagaatatgggaaaatacaactaagaaacaacccaagggaacaacttgtcactgatgtttatatgcagagttgtgatacaattggattccaaacttataaaaataagtctctagtttctacaaaaaaaattcaagcaagggaagacgattggaagtgtcttaatttgcaaacaaagggcctaattattaaccttttgtttccatatccaaggctagcttaacagtgaaagggacctaaaacaaatttaaagagaaaatattttactttaaaagaaagaaatatatgttagatctttttcctaacactgatatttttgtcaagtgacattttttactttataagaactaatagcaaatatatttctgttagtagacttaaaacatagattttagttgttttagccttgagtaccatgtacatatcacgtgataatggatacaccaatagcatggaaaattcatttcatgcaccaataacatggaaaattcatttcatgcagacatttgttgatgataaaaaaacaccttttttttatgtattttcaatagatagattcgatctgctttaaaagctagcaattcaaaatgttactgtttttgcctaattgcattgtaagagggtagccaggccacaactggtgcatgcttttctagaattacatatttgagatataatattgacagttaaactatggtgcatagctgctcattttagagaatgtaaattaaacggtaggcttaattaggaacatgggtatccttgtttggatccttgtcattaacatgtcatgtttgcaggagaaatagacttgaactgggctagtcaaattataaaattgtcttgtatcttgtaatgttgtgcaatcgaggggatatatataagagagatttatatcaatgagttatgagtaatcatataagtgaacttgacaccatattttaacccaaaatcttaaaactctagtttatgagtctttcttttacttatatggtgttcaatcttttcattcctatacgatgtgagactttacctcacacttgtactccaacatgtatcaaaataattatcttggtacttccaaaaccattatagacaactcttatccattagtctaacaagcttagaaagaagatataatgttggttggatagttaaaaaagaagataaatgaaaaaatatcacaggttatattcctcctcctaataaaaactgttaaatcaacaattaacatttatcgatgaaaaaatctaacaagcttagaactttaattttatgtgtcatcgcagtagcaattcttataaatattgaaaaattacaaagcagccacaattgtagtcacaaaaggattcctaatagaactctaaggtattccacaaactttaatcttttaagtcaattacgagactaattattactctcgaacttagtcatacttaacattttatgttcctctctaatgattgtacaatgtgaaaatcaaactcaaatctttttccacaattttttttgtatatttagaaacattgtgaggttgtaatctatgttccattactagttagttacattatagtctagtttcattgtaaaatcaaattaacaatatttttgttaaataccttacaattgaaggttaggatatattattagaagcaagttaggacaagccaaaatctaagtagacaaagaccatgcacataagagaatcacaattcacaatcaaatttattactaatcagtaaaatgtttcaatccttaaggacaataggtttgtgtgcctattgcctactgattgcaacctataatatggctgctggttcactaaaaggagattgtgcctattcccttatataattcaggaatatatgcatgtctgcagatgcatgcacaccataacaatatctagatatcaacatgcacatgacatcatttgaaccaatgagggcccttaatgacattctggaatatgaagcttgtatttatttgtgtcacaaaagctagagacatccaaaactttttgaattagaagcttcaaccgtaccattaatttagctttattcaattgatcaacataacataatatcgatgatcattaagtaacaggggttgttttgcatacctcggtacccggagcccaccgcaggattctatttgattattggtttatgtcagtaggtgtctgtgcattgttattttcttaattgaatttggttagtgaaaaatgttaaacaagaaccaaaatggtacatttgccagctcatacatcagatgtgtaaaaccatccccacgtgcagtgaaggtaagagcgacagatgggggtgttgaggttcctagaaaatggatgatccatgcttggcattccctagctgaggatacaataacaacaatcaatggatcttaatggatattgttggaaggttgtgatattttcaaaattcctttatttgaacttgaaaaaagaagcttaattattatcttgatctttaaatttattttttaagtttaatttagtcttactattatttagacaaacactaatcactaattagtattcttaagatattggttaataaattttaaaaaaatatttttattaaaatatgtaaaattatgatgttgatgatttttttacgctatcctataatttttataataaacattgtttccttttatttcatcaaccaatgtccaaaagacatgggttaacaagatcctattattaaaaagttcaattatgttatttaatttttaaaaatatttaattaagttgttttatttttagaagtgtcaattcgtcctttattttaaaaacagattcaatttggtaccatatttctttcatacgctaaaatatattcacaaaacaaaaacaaatttggtttttctttattttatttaaataaattcattttgggagcttccccccctaaaataaaaaaaaattaaaaaattacctaaataatacatcgccatttttattttgtgctagatgagaaatcgttccctaggagtcgatttctcatttgcacaagtgtttttttttcctgcatgagttaagaaatcggttcacgaactgatttcttaactacttttattttatttttttgcgttgagaaattggttcattcctagaaaattgacttctaattgtgccattctatttatttttttaaaccagttaagaaatcgattccttggaaaccaacttcttaactgtgttttttaattttttttcatacatttttatattcttttttattgttttattaattgtatatatggatcttttttataaaaatttttattttgcatatgttgttaatttttgcatatttttttgtctatatatagtttttgaagcatggaaatcctttgtatttccattttcttaattgcgtatatatatatatatatatatatattaaatattattttgcatattttattgttaattttttgcatttgttttgtttattcattttttcaagagtgaaaatcctttgtattttcattgtctttggttaataaaatagataattaatcaacaacttaattccttaatttaacttaaaaaaataaattttattttgtacatgttattgttaatatttttcatatatacacttgtattcattttttttcttcattttttcaagaatggatttccattttatttttaatttctttgcttgataaaatacatatttaaccaacatctttaattgaactaaaaaaaagattaagttaagatgaaatagagataaaattacaaaaatagaacaaaatatttaaatttcaaacaatacaacgaaattttaaattacaacaataaggcataaaattaacgttgttggattgaacctacacagtgagggaatttacttttggaatggcctcggatgcaacacacgaaacatcttttttgttatcctcgttctctcatccattttgatgtgcatacaacatgaaaatagacgacctttataatttcttaacatctttgggttggggtagattcgtggtttatgacactatgaccattatgctttgttgcgaaattcgccaaacaatcatttgtactcattggaaacactttccaacgtatacacaaaatgtatgtaggccctatactcatggtgagtatgcttacaagcagcaacgacatgcaaacaaggtatgtgcaccttttggaatttgtcacagtcacacactacctttgatccagcctaactatgaaattttcagctagctgcacctctcttgggttaatcgatggaactcatgaacaatgtgagagttttcctttctttgtgcatcttccatagccttgtttagtacttctatataaacttggccaaatgtaattattgttgcaacttgtctccctctttggttgaacaaggtattacaccttgtatatgttgattttactagtgcacatattggtagacttttttgttttcttgagtattgaattgattgactcaacaagattggtggtcatgtgtcaccatatttctccaccatctgatgtgagagtccacttttctcacagaatctcctttagattgttgtaatagtgattgatcgtaggctccgtccttacatatgttgagtagttataaacataaaatttcaatattgtgaataatagaaaattaagtgatatttactatgaagagaaagaagtttggcactcatcatagtgataattagttttttttatgtcattgttcttgaacttcttcatgtaattctgtgcaatgtgtcaaatgcataacacataccacaaggagagtcctcttgtactttctgtacaaccaggttccatcgacttgaacaacggacttgcaatattgaaacccatcaatccatggtttgaaactcaaaaaagaatatggaatttcacgaaaccctctactgtttgaccttgttgtggaggcactgtcagtgtttccttctctacgaccatactaggaagaaatgactgtatagcttacaacaatcttggtaaatcgtggaatgatttttcccattttctgtagatgttccaatgacatttttctttgccaaccatgctttctggaacgtggtagtttatcatttagtgctttcgacatgtgttaccaaggctggcattgaagttgatggattgttttcgataatcttgtggatacttttactgataagcatataagataactttgcatgatcttgtgagatggtaagatttgaacatatatgggcttcatggagctttctaatttctcatttcttacttgtaaggatgcatgttgccttgaacctcctggaacatccattgtcatcacaattgacaattagctttgttaagtttgatagttgtgtcttgtaattagctcattttttcacatgatacatgtagaagcaaataacaaaagaagggatgttgaattgtgtttttagaaattttgaactttttcttatactgaaatcatgtttatcttctgatgtggatttacctaaaaatagataagggatagcgaagttgttgcccttgattgagcagtaatgaatatttgaatatttccccatatttgattgaaagtgctattctgaaaaactttatcagaagatggaaaaataattttcttgacatatcaaaaagagaagtaagatctaaacacaaatttgaatcctttgtcagttaacacaaagaaaagctataacgactatgtttcttattacaacaactacgtattatgttcatttttaattaattatttcgtatgtaactgattacgcttattaatttacagaaaaattttcttcataattgtgtttaattaaaaattaattatacgaagtcgaatatttctaacacgttttgcgaaattgctagttacaaaatttcatacataagttaaattacagtccaaatactatttagtctcaaatagtttgttacaacataagattcatacaactcatagtaacatcaaatacagacaaacaaaaaccacgaatccagtacatagaacattcagcagtacacagaacatccagcagcacacaaagcatccatctccttcctcaatgatttccttagcttactgttcctctgctcgcccaaagtaattggggtcatcacaggtgtcaaccacagacacaactcgggtaagtatatgataaacatgattagacaattaacagaacaacaggaataactaaacagtgtaatgatcataaattaaatgcatgatgaattatgcatgttttctttgttaaatgatgaatgactgagatctcagaatcctatcaaaaggtaccagaatcattatagtttcacccactctagtgaaacctccctccactctgaggggtataatcaaatagttccacccactctagtggaacctccctccactctgagggtaacagggtaccataaaatagtttcacccactctagtgaaacctcctccactctgagggaataaatgcaaatgatgcatggattcattttattttttagttactcctttatttatcagattcttataactttggcacaaaaaaattctatgcttccatcatgattaattcaaagtgtaagtgcatcataatttccttttagtatacatactccaccactttcaacatcttaaatcatattacatataactttaatgtaaattaaggtgcaatattaaataagtagcatagatcaactccaagtaagcattatataacctttgtataaagaaagatttattaccaagtgaataatatattacaacaagcaacatgtcaccatcaagtaagtaaaatacaacaacaataacaacaacatgacaagcaacatgtaaccttaagaagacaattaatcataaaatatagatatttgtatttcttagtcactttcttactaaattacattcaaattatttattccttgagttatttaagattactcatcatctaggtattcttttatttatttgaggcatttttacaaacacttggtgtgcaaagctttaggttattggaaataaatgacaacctagttagaatctcatagaattaaatgataacatgacataattaattatctaaacatgttataccatattacttcccataccttggcttttcttgattgaaattaagctaccttgcttcaagaaccttaggcttcttcacgtgaactttcccaggttatagcttcttggttggcttttgtgtttaggaaaggaataagtgaaagggatgtgggctgaaaatgagatgcaaaccgtgaactagcatccatttggtccccaccaccctttttataggctaggttacttaacctttaagtagaaatatcttaagctaattattgtttacctttctagttggtttcttcttattggctagagtttttccaccacacaagtgtcctaattcaagagaattctatacctttccactcccatctagcatgtacacgtgacctagcttggttttggtgccttccacttgcttgaatctgtgtggttagctttagtgtaggtgtaggagatttttgttgatttatcaagatttctagctttccacttggctttatcatatgcctccttaattcttggctgtccatgtgtcctcattctcaagttttctaccttattctcaagaattctatagctttcttcatcattctccaaagtacatagtcattctacaattttttgaagtaaaaaccgtggaaaaattctgccaacaacccgttttataaaatttttcattccgaactcattaaccgttggatcttcttataattttaatggtataatcctaactcatatatctaaattttgaccgttgggatttttgaaataataattataacttcctccgtgtccaaagaagtcaagaggaaattttcttcaataaaaatttccttaaaccatcattatttcctaattttttttctaaatttctattggttcattttgttttaattagtaaaatgtctagactactttattcaagaattcattcctttcataattaagagaaaaattcctagattgtatcttccttgtttctgtgtccatatggaacttggattgttttatttttagtcttttatgagtgatttttcaaaattcctgaaaatgatatcttagggtttttcttaactaagattatcaataagtctttatttaaggccattctatgtttgtgtcaggtttccagaatgttactaagtctatttgacctaaccagagctataaggacatattggtcatttggacaaatgttaggggtattttggtcttttatcctaaggacctaaatgtcatttgtaaaattatccaaggacattttgggcattttcaaaaatatctgaggacatttatgtcatttatctagtaatgcatatttataagagaatgcacagatacagagaatatggggtgttacaaaagcagtaaagaatatcacacagagaagataatgactgtcgaaccgttacaaaacaaataaaactaagataattctatagcacaggattaacctaagtcgattcagagatacagtccaatttgattcctgacttaatgcacttataaacaacaagggggtttatcaaacagtttgcagacagggaacaaaaattgcataaacacaaacaagaattgaagaaaaatgcagaaactcataattgataaaagatgttgtaaaatagattcaagaatatcaattcaattcaccaaaccaagcaatgaaaattatcatagttctcagataatgatcatattatgaaggttcattcaatatcattagatgcagttcaatcgaattaactcctaaatcaatagaaataaatctataacctaatttgtttttataatgacccaagttttgtaaaaaaaaaaaaaaagaaaaaaaaatctcaagccagtagcgtgggagtggcgttgatggtatggcactgtagctacaggccatttttcactggaatctggagccagtagcgccagagtggcgctaccagtgccagatgcactggaagatggcgccggtagcgcgggaggcacgacagaggccaattttctctgtaatctggcgccgttagcgccagaactcgtgctgagggcctataaaaggtcatttcacgcattttgaaggccaaaacttgcttttcttcaacctctgagccttttctgccattaacgaccagagaagcttcatatctcctccatacttcatctaaacacttcctatctttcaggaaagttgtttagaactcctccatgaactagattccaacttcaatccttagagaaaaccatcaatcggagagatccctttctatagggaactttacaaagcttggattttgaggagaaagaaggagattcaaggacactgaagcttggagaagcgatcctttagccttcctcaactgttttgaggtaagaaacttaagttttaccgattgatttgtgaaattggtaatgggatgaatagtaacccatttgtgttagggctgaaattaggcttgagttctttagaaatgtatgctcaggaggttgttctgataaagaatgaactttgaaacatgactttagatgaagtttgattttgactctgagatatgtatgagtaggaagaatgtgggctaaatgaagggtattataagatgtatgggcctaagtgcttttacaaaagatattcatgaggctgaataaatggtgaatacgtgctgaaataactgttttaactaagttggatattattgatatatggcctggataaaggcaattgaactggttgaattgacttatgcacactactacaaaagttggtttttacgacgggcaattaacgtaggttgtaggaaaaccgacctagtatgttacgcggtggcaattccgtaattatttcaacaataattaacaaatgaagtcggttttttgaatgaccgacgtaattgactaaaatacaaaggcggttatgtagcttttttaagtcggtttttttaaaaaaccgacttcgtatctaacaattttaagtcggttttttaaaaaccgactttgtttcttcttcttttaagtcattttttttcaaaacccccactttatatcaacgctttttaagttggttcttcgaaatgaccgacttagatagtacgagttacaaaaaaaaaaaattgaaacaaagtcggtttgcagaaaatcgacgtggtaaaggtccctatttgacgatgtcgggttacaaagtcagttcaaaaaccgacttagtataggtaaaataaacgacttagtatgttgctgttgtagtagtggcagagtctttgggagactctagtgccttggttaggcagagatagatcctgttgaaggtctgtaagtcaccagttgggtgactagctttcaagacttgatatagagtaataagggattagaatgatatagataactattcttcttgtcttttgaacggttaaaagccgttattgttgattgattgtgtgcctgtatatagggtgggacaccgagagtgtcagtggcggagaccacagtccagggattggacagcagagcactaccgtgtcaggtaagctcttcgttcttgggagtgtttcccactacttgtgttcctccatactccaagattgagtgatgggtgcatatatgatttacatgcattgaattggttgttacggctttcttcatgatgatatgtatgcatgtatctatgctttgtgtatggttgccttttttcggatagatcttctagccagtaaatagatatggacctccctaggagtagagcgcaactcctagtttggtttgctccataggagaaattccttaagaccaagagataggtggtctcgtgttgtagcagcctattctcggaggtaccatatggcctgcatacttgcataggggtagctcccgttggatgacacaggtgtgagttccggcctcacactatggactcagatggtccatgatgacttattgggtattgagatggtcccaggggactgagatggtcctagatacttatgatgttacacattagagcttgtgtgtgcctatgtgttgttgtgatgatgttgtgatgcctattaatgtattgtgatcatggaagtgagccagggtgaaggaaaaactccaagaaccctgagcttactgagatttttatctcacctcatgtgtgggggttatattttgcaggttgtacagctgacagggatgagggaccccagggcgagaggccctagtagtggacatacatggtatagtttcttggagcagtgttttgagagcttggttgctcattgttgtgtacagacatatatatgtgatatgtgttgttattttgtacccttgtgggggaaaagtgtgtatgtttgcatatattgaatttctttatatggtgtaccctaatatgaggatttgatatgtgatatcagggcattgatgtctacttttgtatgtggaatgtaaatataatctatgtataggcagatggatatctatggtttataacctcctggtatatcggtttggatattatagtcttatctgccgttgtgttacattatttggatcactaaggctgttgtggtaatctggcattcgtttactttactgtctatacgtaccatacataatgaatcaagaaatatggtttcgaaatcgcttccgcgactttttaattaaattaattatgctcttatctaattaagtaatatgttaatacacctgatgcatatggggtgttacagttttcaatcctaaacatattcgtaatcatgaaaatcaaaaagagaattgacgaagaagatgaacattcacctagaaattagaataccaaatcagaactcaaattctccttgcttgaacaggatccttggattgattgattgtttagcctttcatgatcatcatcaatggaagatccaaaagatttgtgcaagaaaatagaagaaccgagatgaaatgaagaagaaaaataaagaacaatgaagaacaattgagagaaaaagagaaaaaattttaattttgaaaacttgcacaagaagctagaaattctctttttgtcctatctagacacactaatatatagtaaccgaacataataaagggatggactctgattaggctgatctaaactaactaattatgttaattacacaaatcgaaacccaaactcatagtcaaaaactcaagtgtagaggttctaacttccaagcctaatttgaccctcaaatcggcagaattagcccaatcttatttctgacaaaattatagctttttgcttagctttgtagggattacttgaaaataaatagcatactttaacacaaccaagagggggggtgaattggttgaatcttggtaaattaaaaatttaaaatcagagttaccacaggatctttatcactttaaaaattgtttcaaaaccaagaatcaatattcaaacaaattccttttccaagaagaatagaaaacagagtataactttctgtgcaatgagattgattcacaaacaaagcaattaagagatgaataggcgagaagaaagattagccacagatttttatactggttcacttcaaacactatgaagctacatccagttcttccactcaacactagagtagagttccactattgcaaaaatattcttacaagcaattacaagcctcttgatcgaggtcgtactcagtcaaattaatacaattaaatgcagtactaggaagtgactcctaggtcgtctctcaaggatcaattgtctgcgttagggattaaacgtgtaatgggggatttttaacagaatgcaaaaatatctaaattaaaacagaaatgctaagtaattgcagtgattaattaaacaagtcagacctttgaacagattgcgcctctaatatcctcagttcacaagagataatatatcctaacttaatccagattaatctactaagcgaagattaatctaaaatttcctacacgaattaagcaaacgcgaacctcgtcaggactaatctctcaggattaagcaacctgagattactgaatcaatcaactcagaatcattaagcatgactctaattcgaaaacaatacagaacagaagcccaacaaggaagaaccaagtagaatagaattagaagaacagagaacctccattgaaggtctgcaatctgtcctagggtccaaccctaggatttagccttccatgaattcgaaaattgcaacagaaacacgaattaaatagcaactggacattaaacgaaattagcagagaaaaaaattcaaaagcagaaaacaaaaattaacataaacaaaaacgaaaatactggaagcagaaaacggaaacacttgaagcagaaacgaaaataaacactagcagaaacgaaattgtattccgaaaacaaaaatccaaacagaaacgaaaaccataagcagagtactcaatagaaaatgaaaacctaaaaccctaaagagaatagctgagtctcctgttttgcatgggcacaatattctaaatactagtgtctggacctttcctaacaattttggcccaggaattcactaaagaaaaataaaatgaaaataaaatgctgatgtggaaaatgatgctgacgtggcactccaatcttcaagtccatgaattaattccaagcccaattaattattaaactgccctgaaaatataaattggaataattaaactcaaaaaaatccaatttagttaaaatctgaattatcggtccaattaaatcctaaatgagaaacagtgcaaaatataaacgattaaacacaaatcagggattaaaatgagtacagaaaggtgagaaaataaaggtaaatagcgactcatcacctctctttatcaaccctagataaagttcagaagtctaaaacactattagacccttagagaccaaaacccacactgagaacactactcagctgtccttagagaaacactatctctgaacatgtaagaaacccatttacaatagactaatctttacaaaattcaaacaacagttttacaccttcaaagaataaggaaagatatcacctgataatccaagaactcatgcaaattcaacagattgaatgacagattactaactcaatgcattcctttccttatgctttgatgaacaatgatgcttcatttctatgaatcaaaaacccataagaatttgcgaagcccagatgccttttgaaactcagaaagtcactaatgaaagcttgtgaatgtttgtgaatgctcagatttcgaaattctcaagttacaaaaacatagagcagcgggttctatttataacagctttctaactgaaaataatcgattaaacatgctcctgtaatcgattatttcgcatatgtaatcgactaattcaagaatgtaatcgattaaagtgctcctgatgagttctgagtttaggttatgaacaatataatcgattattccgtgaagtaatcgattaaaccagacatacatgtttttctaaatgcattgattaatcgattactgactatggtaatcgattaagacagtcagacacatatttttaaatgaactatgtaatcgattaccttagtaaaacatgtttaccataggcacggatgtaatcaattacgaccatctgtaatcgattaagacagacaatatgattttcctattttggcctatgtaatcgattaattcgatatgtaatcgattactatgttcttaatttgttttctaaaaggaatgaagaacaaaataaacgattccaatacttatgtaatcgattactacattagaacttcatttttccaaaaactttgcttatttaagtgcctttctatttaattgcttttactaagatctttaatctaatcaatcctagatgaatgattcatgcatgatatgctcaattggattatcagatcataaactcccttttacattaatcaaattggtcttcaagctttcttgaaacttttatccttgagcatgttgaaagcacaaaacacttaagccttgattccttgctcatttgtacatggcttcacttgaatcaacattactcatatgctccatttggagttctgtagaatcctctaggtcctgcacaaggaagataggtcaagtaagcacaaaatctgaaaataagcaacaattatcaattaattccaattatttgcctaagaccaaatgtaataccttgaattttaagcacgtaactaagcctagattaagctcatgattaaggaaaataagtatgcttgagagtattagagaaaaggagtgaaaagacacgggaaaggattgttctggcatatggcgcgacccacttggggtgcggcgcgacacgcgccatatgtgtaaaatagggcagatggctctgccatgccacgcgagtcacttgagttttcacgcgagtcgcgtgggctgaccgagaatatgacgcgggtaacgtgaaaatccacgcgagtcacgtggaaaagtggccaggaatcatgtttttcctctggggctccacgcgagtgacgtggaatccacgcgagtcgcgtggaaggcccgaatgaatggcgcgagtcgcgtggagaagtggcgcgagatgcgttggatcgacggtttgcttctataaatgcctctagggctgaaagagaaaggagaaaaaaaaaagagaaaagaagagagagaaagagagaaccgccatagacgcgctttgagagcttcatatcttacccatctctcatctaaacacctccgacccaactgaggaaatgatcagcacctcgagataagtgagataccccgattgattcttgagaaaaactgagaaacagtgaggtttgatttctctgagagaagaacccctgagagcttgagacccagaggcgaaagaggcctagatcgagcgagtagtctgagggaaagtgattccctggtgcttctgagcattacagaggtaagaaactcgagctctaactgttggttctgagttttggatttcggggttttggggttatcttgagggatgtttttggaggtgttagagccgttattaggctcggactctgtagagtcttatgctcagaggactgttctgagaagtttagagccttgaatcatcattactgatgaagtttgattttggctctgagtcagtctgagcagagataaaaggttgactagttgactagtctggaccttagagcagttaacaaagttgctcaggagactatatagatgagattgaccggttgaaactgttgattatgagaagtttggttttaggctatggtaggcagagatataccttatgttagcctgattagagtcttattagaggctctgaagccttgtgtaggctgagtaggactcttgtgaagggtctgagatcacttgtatagtgattagtatatgtttagagaaaggatggtagttccttttgtttgaacggtttagaaccgtaattgatgtgttatatgcttgttttatgtaggacgtgagcctgatagctcaggtggtgttgaccacgataccgggagagccgatgacttgtccagagcaggtaagctcttggttcttgcttgtaattcctttactgtgttccaccacactcctaaaggggtgatggttctgtgatacttttatgcctatgtggttgattggttattggcctggttgactggtgtgtgatgcttatgccctatgagagggtaatggctgtgatttgatctgggatgctggtcatctgatcttgacccagagatgggtgattatgatgcatagctatgatttgtttagcttgagatatgcatgattgattgtggaatcctatggtaataggatagatgacatgtgattgagataagcctgacatgagatgtttcctgtggtatagaggtagcctccttagtgagatgttcctatattcacagatgtagcctcctcaggcgaattgtattgagacaggatatgagatgtagctcatgatagaggtcggcccggtatataggagtcctccagacgtggttgtacctatatatttttggaggtgcctctgatagatagtgatgtcctgccatgagatgtcctagtatatattggatcctctgtgagtggggatcggcatatatatctagatgaaagcctccgcaggatgatgatgataggtgatagatggtgattaccatcggaatcacatggatattgacagatggttgtacattgactgcttatgtgtggattgaatgaattatcgatgttaaccatgatgattatgatgtttctgtctgtgtatctgttgtcagttaaccaggggaatggaataccttcaagggccctgagtttactgagattttatatctcaccccttgtgtggggctatgttttgcaggtgattcttccagagcagcagagagatcccaaggcaagaagcctgtgcaggattagctgctgatggacacactaggatagaggacttgagcttgttgctcatatgttctggttttgttttggttatgtactttgatgtaccctgatgggatatttgtacagttttgtattgtacagtgggactttgatgtatattcaccatattatgatgtacagtgttatgatagtgaccttgatgatgtcacttctagtttatgcttccaaactgcttaaactctgattgattatctgtttgattgtgatgtgtggttagtaatgacctgattaataaattgggggcgttacaccaaaactgagttaaagtgagaaaataagaaaccaagagaagtcaaataagctaagaagaatagaaaattactaaataaaaaatgctcaaccaaattcttgcacactttatcttttgtactcttgggcaaaactaaaagaaagactaaaagaaaaacaattaaactagaataaaccacaaactaaaaagaaagatatgaacaaggcacatacatttttcaatggatcctaataatgcacaaaagtgagaaagatggaaaatggaagaatgatatcaaggtaacaagcactctatgaacacatgatcacaaagtgtaaagtgaaaaagtagtcaagttaaaattaagaatgtaccgaggtgatagaaatctctcaaagaacaacactcaacatcatcaaatgtgtatgagtttgtggttacactcaaacaccacatgtaactagcacatccaaatattgacaagactttaattaactcaactttaattcaaaaggacttttattggtttgtaatgtatggcttaggtaagggtggataaaagaaagatatttaggctaaaactaagagaaaagaggggcaatggagagtaagccaacaattaaaaagaagggtagaaacaaagaaacaaggtgaagaacaacaaaattaaaataaaaagaacttacaaggatgaaaatgaaccacaacacattttcattgcaatttttttctttttcttttcttgtacttcttttcttatttttattttctttgaactttttctttttatactctttcttttgttgtatttactcaaaatgtgcatcaacttctcttcatgctcaagtgataagttgctagatatgatgactgggagcttctgagactcatctaaatagacatatttaaggtgctcaggtagtggcttcagctccaaggaaggtggctgaatggtggacgacaagggaaggttggtgactgatgaaaggtgtaaggactttcattttcgggtcagaaaaccctgctaagggtgcggcgccggtggcaccaggattggcgttgatggcgccaaaggtaatagctttagaattcgttgaaaggtgcttaaaatgcaagttttatggctgttctggtatatggcgcgacccacttgaagtgtggcgcgacacgcgccatatgtgctttccagggcagatggctctgccatgtcacgcgagtcacttgaagatccacgcgagtcgcgtggcaagtgacccagaaaacatggttttctctgaggctccacgcgagtcacgtgggatccacgcgtgtcgcgtggaaggccagaaggtatggcgcgagtcgcgtggttagacgacgcgattcgcgtgggaagtggctcagaaagggtatttctgtctgccatctcaagtgaaacgcgtgggaggccaagtgagtcgcgtgggaacgtcggcagaccagtttttaaaggccaaaacgtgagaaaatggaaggaattccatttcttcttcctcccttaagccaacctccattgttgaagtccttgagctcctaggacttgttttctcagcctaaacacttcccagtgaccttaaaccttgtttataccgattgaaacgctaaaatccttcatcatcagttgtggaaaccccagattgagggagaagaggaacctcagagagaaaggctcagagaactcgagctaggctcgaacccacggtgtgggaaggacgtggaagcttgagtgagttgtcctgaagcctttggagtcgccactgaggtaagagatcctcgtttctccgtttgattttgattctggggggcctctgtgaatagtgacccatatgagctggggctagaattagcccagggtccagttgagaaagatgatcagggcttagaatagatgaaggattagctttcagtttttgattctgatgagtttggattttgcctctgtggttggtctgtgtggcctgtgtgttgaatctacattagtgtagaggccattccagagccaagaatatgtctgttatgagcctgtgaggctagttgaatggcaccatggtggaggttaggccattcatgtggtttctgaatgtgaggaggctgatggtttctgccatgctatagccttcatgatatgatgttatggcctagtgtgcgccaggctgaaatggttaaaccctaggataggggacttatatggttatatacttgtgattgatgtatgtggtctgaatattgatatgagctatacatatatgccttgtataggcgttgatcctgagtttactggtggcgggagccacagagctgggactagaccacagagtgatattgtaccaggtaagttcagtgtccctgggggtgattcccatcttgtgtgtcacaccacactccaggggagttgtgggcatttcataatgcatgcatggatatttgcattcttgtgatgatatatatatgcctctgtgtttgaattgtactgtgattgtgctgagaaagctctattggccaatagatggttatgggagatggcaattcctcccaggagacggcaattcctcctatttgataaaatgttataggagatggctattcctcctattattgaatactagcacaggagatggctattcctcctgttatgagatactgatatgggagatggcaattcctcctattttatagcattaatacaggagatggctattcctcctgccctattgtgttgattatgcatgtatgttatgttacaatgttatatgaatcagaggctaggccggtgggccatctatttgtgttatttgctgtgcttatgatgatagggggccagggtggaggagattcctccatggatcctgagcttactgagatatattatctcaccccgtgtggggtttatgtggtttcaggtgaaccatcaggacgagaagagcagtctcagggcaagaggcccatcagagactaggctgcctagttgaggagcagtatagagagcttgagggctccattttgatgtccttttgatatagttttgtataccccttctgagggattatattcttttgtagcaccgggtgtggtgtgaacctgaaatgtataaattatacagaactttgatattatgtatatgagactttcccctgagtacatgtgtatagttattttgttgttactctgcctaaagctctgttatctgtcttatttatattgttttgacaaactggatcagcaggggcgtgagtttatggttctgttgtgtgattccatacataatgtatcaagaaaacgatcctatgtttccgctgagctaaataattgatattttatacgctaatctgatatgattaatgataacacgtcggaggcctacggggtgttacaaaagggagataagagaatcaacacctgcacttgtacctgcaacacaatcagagtgaagtgtagaggaaatctctgcacaaatactacacacagtagcataatcatcacaggtacaattaaaagaaataagatcaaaatcagaaaagtcagaaaattcagaaagtaaatctgtacaaatatctacattatctactacaacatcaatgatatctacacggaagatagaatgctcctctgcaggatgtctcatggcctcaaaaatgttgaaatggacaacatcaacaccaaacttcatggaaatagttcctgcatgcacatcaatttttgtcctggctgtcatcaagaatggtctccctaagatcaatgtggaaccatgactggaagactcattctccatatccaaaatgtaaaaactggaacattacatcgcaccagcacatcttcaataactccaagtggaagtgcaacactcctgttggctaagtgaatgacaacaccaatgggtttcaaatcaccaagttgtaatgacctgtaaattgatgtgggcataacattaatgaatgctccaaggtcaagcgttgcatctgtaaaagtgcaatatctaatggtgcaagggacagtgaaagtgtcaggatctttggacttctgtggcacggtggatggtggaatggaagcaacaattttgctctgtataagtgtagaaacatttcttcccatcttgacttgctcatttcccttcagctttctcttgtgggtgcacaaatccttcaagaactttgcatattttggaatctgtttgatgacatccaagaggggaatgttgacttccaccctcctgaaagtatcaagaagatcagaatcaagctctactttttttgtaggaatggatctaaaaggaaaaggtagaggaatatgttttggtgcaaaatttgttttggcaccatcatcaattttggcaccagcatttgttgaatttggaagctccttgtcattccttaaggtaatagcactcacattctttggattaataattggttgtgctgaaatgttgctagaaccttgttgttgcatctggttgactgttagcgatttttaatacgctcgcaccacgacgcgaatggcgcgagttgttcgagctaacaagttggccttccttgatctggcgctactggcgcagagtccggcgcgactagtgcagcttgttcgagtctgaggtctgttaatttacaagtggcgcgaccggcatgggatctggcgcgatccgcgcgggaccttgaactcagttttcttcttttcttggccttgattctcctcttttaagcctgaaactgttcaaatggtaatgaattgaattaaaaacaaataaattgataaactaactattcttattctattttcctaattatttaactaaattataccctaaaactaacctaaaactaagatatgtttgcaacacatcaaacaattcccagatttgaaagttgttgtccccagcaacagaaagaattcaagacttagcaagaatcaataatcaaacataaaccacagtttacaatcctagaatcattatgctatgtatgatcaaattcacatcaaagcttccatggtacttttaatgctgtcaatcaatgagagcaacttgagtattcctcacagaattgtgtttaatcactcattcactcaagtgtatcaggttatgattgctctcttactcaacaaagtcacagcactaccataagcttgaaaatattctcaacagttgcaagtatgacttgatcaaaaggtctttccagcttgtaacgtggctgggctaagggtaggaaattctttggataagtagcttagaagaggctagatccagtcccttaagtccacaacatgcttcttgtcttatttttccaaacctggtaccttattcaacaatttattccaaagtaaaagcagaaaagtaactttcttttttaaatttttttttaaaaacaatacatcaatgtaaacataagcaaaataaaaattactgcaacttctcaaaattccagcttgatggacttattgtttttctgctatcatggacttaattcaaaccttttctagcctcagggtgttggtcatttggatgtggctctgatttgggaaattgaaatgaaaggcttaagctcaaatacggtgcaattggaaaaatactgatggtgagtcaatttggccctagtttcagaagaaaaatttgccttaatcatatcaagtcacacctgcatccagagaaacaattcaagttctagagtacaatgaaattggagtctcttggaaagaaaatatgaccgctgtttggcttaaatccttacaggtgttcatactcaagtcaaactctgctgactgcggttcaagcatcatctctccctcaacatgcattttacatatcaacaatcaaattccattcatgcatcatgcagccatgctatgtctcatttcatcaagctttcatcaagaaatccatccattactgtgttcattcacttttgattctgaaaaatttgatgtgctgcttatttttgaaatttttttttgaaaagttctgttagacgtcatttgttctttgattgtgatttgcgaaaataatgtgtaacgaccattcccagatttatatgttgctgtccccagcaaccacaaataaggtcacggtgctttggaaaattttgagcattatttggaaaatcgcattcaactcaacattgatctaaacagttttattggcaaaatataaaccagaactgtgctatatatataagtgcagtaatgtaaatgtgcagaatgtatgaaaaatgtctagtgcagaatccaaaataaaaacaaaaaccagaaacaagagaataaacagaaaatgaaactatgtcctcatcactcctctcccttgcctctctctacaatctcagcatctgtaggtgtaggctcctgagtggttagctctgtagctggtgcatctgaggagggaagaggtgtctctgtggctggaggtgtagtctctgctggtgtagtagtgtctaaagttggtggtgctgctgatggaagctggtactcagatggaggaatgccaagatgtctgcaaatggctctaatcatgttggtctgctgagccagttgagtcctgacgaactcctggaaggccaagtatgtggtagaagaataataaatctattgctaacaatcctaaacaagacttaaagtgctatgtacattaccagtatgctttgtttaacgtcttaagctagacgcttactttcatttaaacttcagtggcattgagtggaacagaagctgaatttctatccacttcccctctaaaataatgttttaaatgataaccatttaccttgaaagctcggtcactatccagaggtgagattgcaactgtgccataaggatagacttctcgtaccaggaatggtccagaccaacgtgatttcaacttacctgggaaaagttgcgggcgagagttatataacagcacttgttggccaggaacagactcttttggacagatttagttgtcatgccacttctttgtcttttctttgtagattcgggcattctcatacgcagctaacctgaactcatctaactcattcaactgaagcaaccgcttttcattaacttttgttagttcaaaatttaaaaacttggttgcccagatggctttattttcaagttcaatgggaagatggcaagccttaccatagacaagctgaaagggagacatacctataggagttttaaatgcagtcctatatgcccataaagcatcatctagctttttagaccagtcttttcttgatgttccaacagttttctcaagtattcgcttcaattctctgttggaaatctctacctggccacttgtttgagggtgatatggggttgccactttgtgcttgactccatattttgctaacaagctatcaaattgcttgttgcaaaagtgagttcctccgtcactgatgattgctcttggcaccccaaatctggtgaagatattctttcttaggaatgagaccaccactttggcatcattggtgggtaaagcaactgcctcaacccacttggaaacataatctatagccaccaagatgtataggttggagaatgacttagggaaaggtcccatgaagtcaatgcccatacatcgaacagttcaacttcttggatgttgttgagtggcatctcatctctgcgcgaaacataacctgtcctttgacagctatcacactgcatcacaaagttcttggaatccttgaataatgttggccagtagtagccacattgcagtactttgtgtgcagtcctatttgctccaaaatggccaccataattggaggaatgacaatgccacagaatatccgacacgtcactttcagctacacatctgcggataacattgtcagtgcattgaaaatataggtaagggttatcccagaaataccttcttgcatcatgcaaaaatttctttttctgctgccaattgaattcttcaggaatgattctagcagctttgaaattagccatgcttgcaaaccatgggctgagttgcacaacaagcacttgttcatcagggaaggattcattgatttccatatctggtccatcttgcaagtcttttttcctgaatcctagacaagtggtctgcaactttgttttcaactccagtcttgtctcttatttctagatcgaattcctgcagcaataacatccaacgcagcaagcgtggttttgcatcttgcttgtgcagcagaaatttaagagctgcatggtcagtataaacaattacttttgaccctactaagtatgatctaaacttatcgagggcataaacaacaactagcatctctttttcagttgtggcgtaatttacttatgcctcatttaggattttactagcataataaataacatgcaagcccttttctttcctctatcctaaaactacacctactgcataatcactagcatcacacattaattcaaaaggcaaactccaatccggagcaatcaaaacaggtgcagtggtgagtttttgcttcaaggtgttgaatacactaagacaagcatcatcaaatgtgaactcagtgtctttctccagtagttggcttagtgactttgagatctttgagaaatccttgatgaatcttcagtagaaacctgcatgacctaagaagttgcgaacaccactcacattaataggaggaggcaatttctcaatcaataacaatttagccctatcaacctctattcccatttcagatattttgtggcctagcactatgccttcccttaccatgaaatggcatttttcccagtttaaaaccaaggttgtctcttgacatctttttagaactttagctaaattagttaagcaagaattaaaacaagggccagaaacagaaaaatcatccataaatatctcaagccctctttctaccatgtcagagaaaattgaaagcgtgcatctctggaaggttgcaggtacattacacaacccaaatggcattctcttgtaagcaaacaccccaaatggacatgtaaaggttgtcttctcttggtcttctggtgctactgggatttggttatacccagagtaaccatcaaggaagcaataatagtcatgaccagccaaacgttcaagcatttggtccatgaaaggtagtggaaaatggtctgttcgggttacatcattaagccttcgataatcaacacacattctccagcctgtgatggttcttgagggaatcaagtcattgttgtcattttgaatgaccgtcatgcctcttttctttggaacagtttggaatggacttacccaaggtgtgtctgaaattggatatatcatacctgcatccaaaagcttgacaacttcttttcttaccacttctttcattgtgggattgagccttctttgtggctgccttacaggtttaacatcactttccattagaattttatgagtacaaaaggaggaatttatacctttcaagtctgaaattgaccaacctatggttgacttatgttccttgagtaccttaagcaattttacctcttcatgccattctagccctctgttgattatgactggatatgtttcattctcacctaggaagacatatttcaaatgttctggtagttccttcaattcaaccttaggtgctcttgttggaatgtcatcttccttctgctccagcttttctaatataggttcgactgcgttttttgcagcaaattctgcattactggattctgcagcaactattgctgctgtatgttgaaattctgcagcagtctcatctgctgcacttgttgattttgctgcattctttggtgttgtctggtttgtggctacgcttccagctaaatgttttgctgctgctgaattttcttctgctgctgcagcaatttctgcttgatcctcagtttcagttgcttttatacctgctgtaatacctacgtaaataacattatccaacacatatagcctaaaacaatcatgctcaccagctggatgtttcatggcatcaaacacactgaatacaacatattcatcatttagtcttaactcaagctttccctgttctacatctattaaggccctagcagtggctaagaaagatcttcctaacagcagagggatgtaactttctccttccatgtctagcacaataaaatcagcaggaaatataaatttttctacctttactagaacatcctcaatcacccctgagggtgttcttagagatctatctgctaattgtaaggacactttagttggtttaagttcagatatgcctaaggacttacacatagacaatgacattaaatttatactagcccctaaatcacaaagtgctctccctacattaatgtttcctatggctatagggatgttaaaacttccaggatctttcaatttgggtggaagcttcctttgaattattgcattgcactcctcagtgagtgttatggtttcacagtcttgcagcttatgtttcttagacagaagttctttcatgaattttgcatagttaggcatattagctaatgcctcagcaaatgatatattaatgtgtaacttcttaaacatgtctaagaacctggtaaattgctgcttctgcacttgttgcttggtttgcaccggatatgggggcttctcaaagcgagaaaagtcccacttctttggttgtggtgcagaattctgttcttctgatttttctacagctttctcttttgatgtttcagctgctgcagaatttttctcagcttccattttgcttgcctcaggcctttctggttgattaagcaccttaccacttctggttgtgatggccttggcatgttcccttgggtttacaattgtatcacttggaaattggccttgtggtctctcagccaactgttttgcaagctgaccaatctggttttccagatttctaatggaagcatcttggttggttctgtgagctcttgtttcagttatgaattctgctgttgtttttgacagctgcaacactaccttttcaagttctgaaggctccttgttgggaataggagggggctgcaagtagttattggacttgtagtctaagccacctccttgaaatttcctttgatagttgtttccagcaaaaaaattgttattcctctgatataaatgttgctggtatggttgttgctgcctttgatcattccaaatgccattcacctgcacagggtcagcaccaacaagaatagggcaaacattagattcatgctcaccttgacaatactcacagaccacatgtggttggctagctaccacttgggctgcagaaacttgcagtctatcaatcttttcagtcaatttggctagttgttgtgccaaaattttctgttctgcaagcattgcatcattagtggacaactgaattggttctctctttggctgatgtactatactttcattttcatttcgggccaaagaattaataagctcatatgtctgagctgttgtcttggatcttatagtaccccctgctgcaacattaacaatcatacgagtgtcaggagtcataccattaaagaatatacgtacctgcttacctacaggcatatcatattgtggacacctcctaatcaactcttggaatctattccacgcagcacaaagggattctcttccattttgagtgaaattggtgatttcattcaccaaccgattatatttatccatggaaaagtattctgcgaagaaccttgagactaagtcctcccaagttgagatgctatttgatgtttgacggttcagccatctcaatacatttcccttaacaacaaaagggaataagcttaatctcactgcatcatctgagaccccttggtgtcttatagtgtcacagattctaagaaatctgtcaatgaagtcatgtgggtcttcaaagtcctctcctccaaattgactgcgttccaccaatgctatcaatgaagggtttatatcaaagtgattagcttatattggtggcctcacaatactggagttaggtcttgtgaacataggagctagaatatcctccattagttcatcttccggtctccgtctcggctgattaggttgttcttcagccatctcttcttcagactctaattcaggaagtgaatcaaagtcaaagttttcagcttctctccttctttgtctagctagtctccttcggattgttctttctatttctggatcaaactgtaaatcctcagaactaactgaacctcgcataaaacttagataagcgattagtaacaaaaattccaatcacaagattaaaattactgtaaaatccgtttgccaatccccagcaacggcgccaaaaactggttagcgatttttaatacgctcataccacggcaagtgcaccgatcgttttcaagtaataaaacaggtaagtgagtatcattctccacagggattggtgtgatgttcacagtaatgaggaatcaatgtgattgaaagtaaagaaaacagaaattgttgaaaagaattgttgtggattgaattggttgttgagtgcaaaaacagaaattaaaggaaacaataaatcaaattgagaatttaccaatggacgaataattgtggtcaggcgcaatccctctgatccctcctctttcacttgactggtttgttagtttaatttacacaaataataaatctctcctaaattcgtaaatcctagataactagcgattcaaccctttaattcgatcgagaaccctaatcctttatcgattctgtcaaactaagcatttagagatcatatgggtttattgttatgattgttcagagaataagccttttctagattagttaacccctaattccttagtgaattaaccctttaacctaaatcgaaaacctaattccttagtgaaatctatcagtttaagcatttaaaagatcatattatagtttctgcagccacgcatccctatccctaggtgatgaacaactgttactctaaacaggtcagaaattagaatcccaacgtccccattgcgaatcctaactctagctacttaatcagagtgatcaattccaaataagaatagaaaataagtgcagaatagaataaaacaatcaaaacattattattcaataccattcaaattccagagaagttcacatcagttcatggccttcccacaatacaagatttagcctgccataggcctcaagaacatcaaagctgttgaatacatagttgtgctgaaaccctagccttgattcttgattttcagaggtttagaaggatggagagaatgtattagatgaataatggatgataaaaaggtatcatcttcagtcctcagaggccttatatttataggataatttaattaaggtaacaaatcttatttctgtgctaaaattcgaaacaaataaggttaaagcaggcaactggatctctctcgcgcgacccgcgcgcgactccgccctaaccgcgtggaccttttgaatcaacggcgctgatcgcgcggtactccacgctaatcgcgtggagtcttcgagctgaatgggttgaaactagaattcttggcgctgacagcgtgactctggcgcgatccgcgtggcggcttcgaatgcctagcgctgatcgcgtggtaatggcgcgaatggcacgagttgttcgagctaacaggttggccttccttgatctggcgctattggcgcggagttcggcgcgactagcgcggcttgttcaagtctgaggtctgttaatttacaagtggcgcgacccgcgcgggatctgacgcgatccgcgcgggaccttgaactcagttttcttcttttcttggccttgattctcctcttttaagcctgaaactgttcaaatggtaatgaattgaattaaaaacaaataaattgataaactaactattcttattctattttcctaattatttaactaaattataccctaaaactaacctaaaactaagatgtgtttgcaacacatcaaacaattcccagatttgaaagttgttgtccccagcaacagaaagaattcaagacttagttgtagctaactgtccaatctgagtctgcagatcttggatggtgacactcatattctgttaaaacttgctggttgccatttgcttcatcaagtccctccaaggaaggtccaaaactactctgcacaggttgtgcaggtgtaggtgcaaattgttgtaattgttgctgttgtttgaacgagggagcttggtatttgctggtgaagggttgatactattgttgtttgaatggttgcagttgttatggacgaggaccatacctcaagttcagatgatttctccaacaacggttataaatgttgttgttgaggtttgaatggttatccaagttgtatgacagaaacttcgacagtctgttctgtttcttggagagaaggacatatatttattggatggtcaggcgcatagcagataccatacaaccttggttgttggctgccatcacattctgttgttgaccaacgacaagttgtctcacaagggatgttaattatgtcactttattcttcaacctctggttatcaacaaccatagaaacaaatacttcatttgcagcatccttggatggtgcagctactctagtaccaaatcgttggtaatttgctgccatgttggaaatcaattgccttacagcaatgggagtcttgtccattaaagcgcctccactagctgcatcaatcatattctgtccattaacatcaacccttcataaaaatattggatcaataattgctcacttatttgatagtaaggacaggtagcacacaacttgttgaacctctcccagtactcatataatgtctctccaggtagcagccttataccacagatttcttttcggatgaatgctgttcttgatgcagggaagaatttctctaaaaatcttcttttcatatttgtccaagtgttgataggatctggttgaaggtacaactagtccttagccaccccatccagagagaatgaaaatgctttcatcttcacatagtcctcatgaatgtcatgtggtcgcatggtggaacacactacatgaaactccttaagatgtttatgtagatcttcacctgcaagaccatgaaactttggaagcaaatggattaatccagattttcgttgataactgacctctgtctcaggatattgaatacaccaaggttgataaacaacatcaggtgtagttaattccttaagagttcgattgttgttaaccattgtatcaacaacaatttcaaaattagaatgttcaaaattagaaaaagaaggtttcataaacagaaaactaagaaacataatgcttactactatccagaactacacttctattatctctgctcaaattgtgaaatgtcctatctatctaaggatgatatcaatgcaagtcatttggtttggacctagtcatgcacgatttgactcatcagtgacagaaatcacaacaataacagaaataatagacaactactaccagaacactgttcacaatatttgctgaaatgatgtagaaaatggaaaatggccccaaacaatttatttattataattttttaaaataaaataaaagaataataataataaataaaaataaaatttaaaaattaccacagtaaaagtctaaaaatcattttttgatttttgtaatgtctttttttatatctttattttaatctatctatcaatctatctacctgtctatttgcctatctgtctgtctgtctgtcggtctatctatctgtctgtctgtttgtatgtgtatctgtctctctctctctctctctatctatctatctatctatctctctctctctctctgtttctttgtgtgtctctttgtctgtctgtctatctatctatctatctatctatctatctatctatctatctatctatctatctatctatctatctattaatacactagtaggaccaagagattttgataaactagcttcttcaaaaccccagatacaaacctttcaaaccaatacagataccgaacccgattatattaaaaaagaaaacaccctgtctataatgatagctgagaaacactagctaaaactacctcctatagatttagctaataaaatatttcctcaagatcttccatatccttgtccagataccaataaaaccagaatcttttatgaatttattctgattgatacagactcaatagaattggttcataatgaagacaataatggtatagttcaattctctaaactaaagatccttaatgttcttttagaccttgattggggccaacctttacataagcccaaaagattttccagaacctttgttcctcaagaatacacttattatgactacatgaccgcctggaataatatcttatacttgaaaccagataaacactcttggtttttctggtttacaaaaggaatatccttaaaatttccaaaatggtttattagatggttctataatttcggccccatgagagagatttttccactagaagtagaagaattatacaaaatttttagagacaatatcacatttgttgatgggtataaatttctatcctttatagcttctcaaggaataacctggataatgagctggacatatacctatgtcagagctgataatgttacaaatttatatttcttctcaagacaagtaaagatcaaatggtggaagaagttcgatataaagttaataagtaaagagaaaatgcttcaatgggccaataataataaagttcaaagaggccagatcgacatagatgcagataaggaggctctatttctcgcacagaagagtcaaataatggcagaattagctacgaaaacatctcaagaagagtttgaagaaaagttacagaggatgaaaggtatccaacaagatcaaaaatcaataaaggatgaaggaagcagttccagtaccaatccttatcataaaagtaaggatatgctggattacttcaccaaagaggaattctccgaataaagaaaaggataatggaaatcatcaagagccaatcaaaagtgtcggcagaccaaataaagataagaagttagaagagtcaacaaccaataaaaagtgtcgataaaagataggatactattgtagatatatgtttctgtaaatacacttgatgtactattttgcactatttactttttactgtttaagtacttttgtattaagtttgaaatccgaaaataaatctgaagctaggtgtgtatctataaataggtatgaataacataaggaaggcatcagccttttagcttaactcctatctatcatcagtctttatctcaaccctttgtctatcttactctaccttcaatatttcttcacttatctttcgttgctcaatactccttgctatcttccttctgacctaccttcaagaatatctaagtaagttttctaaaaatgaattcggaaatatttacacctgttgattttttccatatcatcaatatatataagagttttaaattttgtaatgatcatattcatgaaagtttaattattgaatttgaaaatacttattatatcaggtttgcttatgttttagtaccaagcttagttcccgtaagtggtatcagagccactaagaaaccaaagtattgttaaagagtttctaaagttatcttgcatatctttgtatccttcaaatatattataaagatttctgtctataaaagttattttatttcttgaaagagttaagtgtagcactgagaggtgtgaatacgttggtcagcttcttgtgtctaggtggtcccggcagttgtgagattggtaagtctgttggtttagcctagaaatggaaagaggtggtcctgtaacaacaactcaaacaagaagtaagataactaatatagttaggagtctgagtgaaataggaagaggaaataaggataagcaaatagctataagaactcctcaacaatcggtaaatatggaagaacctataaatatagtaaatagtgataaaattgtggtagaagatatagagaaatcattacataattggtcaatacctttagtaaggaaaagtgaagtttataaaaaacatagcatattttcaccggacaaaaataaggatgaaatacatattgtggaatatagttatccaggaacagaagaaaataaaataataaatgttttagaacaaactatattagatgaacacacaaagaaaggatttaattttatccatttaggattaatacaagtggcggcaaaacataattatagattaggggtaaatacaccaatattaatgttattaagagacacacgactggttagatttagggattctgtaatagccatattagagagtaatttgcatgatggtccatccttttttaattgctatccaaacttttcaatgaatttaagaaataaatatactagtatttaaaaaaaaactacatatacaagtaccccataatattgttaagggagtaacagaccctgtacaaataatatttaggatatattattaagtaacaaaaataaattacaattttagagccttaagagcatctaataaagatgaaacaatattagtagaagctaacgtacataaatctcaagtacaagtcccaaaaagattaaatcatgatgaagttttaaaaaatattcctgaagaatggaaaatagaagatattttagaaccccctaaaatacataatacacaaattagagaaattatagaagatggtacaaatattagattaagactaaatagatcacagtcattaatcataaatgaaccacatatgatttataaaggacaatcatctagatactcaataagtggatcaactatagatttagatttaacaacattagataatagcaatccaaagatatctaaacccgtatatcaagataataataattcttcacctaaatattctccaactagatctcaggtgttaaatgggttaactagagaaatagaaccatttaaaatagataaagaatggattaaacaagatttcttagttgaatataataaagaaaatcaacaatggttttttttaatacatataatgataaagaaagggataaaattaggcaagattattataattatctagaagaaaatgaaattaatatttatttttttgattggattttcaataaagaaaaaagaattaatcctatcactagaaatacaactgtatagaagactaaagaagacaagattgtagagtcagaataccctccatctaaaggagtaaagattaatattgctaatctagaaatagaagtgtcaccatttaaagatgtattagaagaaaaaataatagaaataaaagatattagaaaattgtatcatcaattaaattattctaatattatgttaaatactatttctactcatttaactagaatagaaaataattctcaagaagaaagtagttctgaaaacaaattaataaaaaagaatatagataaaactatatataaaattatgaatgtttcacaaaaagacttagattctatacaattaggaagtagtactgatcttaaaataaaagaaataagaagaaatttagaaaaattaagtatagaaaaggtttcaattaatactttagaaagagataatgatttagaaattaataaattaaaaagaggatcaaattattatcctaaacttaggaactattattctagaccttccccagcagatgtccaatttgaagaaagaggggatatgcgtcaaaatgtttatttaggaacagaaatagctgaatggaatatagatggaatgagtgaacaacaaatattagatttaacttgtcaaatgaatatggcagcaacagcttataagactaaaggaattacagatagaaatacagccgtagccataattcaaggatttacaggccaactaaagggttggtgggataatctatgtacagatgaggatagaaatttaatattaaatagtataaaacaagaaacccaagaacaagatgctgtagcaactctcatttttactataattcaaaactttataggagatcctaatatatttaaagaaagaatagcaagccaattaaataaattatattgtccaacaatgtcagattatagatggtataaagatacattcttctctaaaattactttaagagaagatggatatgcaggatattggaaagaaaaatttatatcaggattacctaaactttttgctgaaaaagttaggataaatttagaaagacattttcaaactccaataccatatgaaaaattaacttttggacaaattcataatattatagtagaaacaggaatacaagtgtgtacagattttaaattgcaaaatagaatgaggaaagaaagtatgacaaatagaagggagttgggaactttctgtcatcaatacggaatagaggttattagagcccctagtgctcaaaataaaaagaaaaataaacttataaaataaaataggaatttaagaattataaaaaataaaaataaaaatgaatttcagaattataataagaattataaaaaatcgtataataagaattatagaaaatcaaataattttaaaaagaaaaatgtctattggaaatgtggaaaataatatctatctatctatctatctatctatctatctatctatctatctatctatctatctatctatctatctttctttctttctttctttctttctttctttctagaaacattattttttttagtagacatatgcaattatattatactaatattaattgtacctatactattatctaattatgagtgaattaaagttgggacacaatgaatcgtatccctaacaacgatgccaattttgataacgattgacgaatcgctacaaaaaaaataaaactaagataattctgtagcacagaattaacctaggtcgtctcaaagatacaatcaaatttggttcctgacttaatccacttataaacagtagggggtttatcaaacagtttgcagataaggaacaaaaattgcagaaacacaaacaagaattaaagaaaaatgcagaaactcacataattgataaaagatgttgtaaaacagattcaagaatatcaattcaatttttcaccataccaagaaatgaaaattatcatagttctcagataatgatcatattatgaaggttcattcaatatcattagaagcagttcaatcgaattaactcctaaatcaattgaaatcacaaatcaaattaaaatatcatccaaacaatatatgattaaaaatcaaaattaggaaataaatctataatctaatttgttttcaatcctaaacatattagtaatcatgaaaatcgaaaagaggattgaagaaaaagatgaacattcacgcaaaaattagaataccaaatcagaactcaaattctccttgcttagataggatccttggattgattgattgtttagccttccatgatcatcatcagtggaagagtcacaaaatttgtgcaagaaaatagaagaacagagatgaaaggaagaagaaaaataaagaacgatgaagaacaattgagagaaaaagagaaaaaatattttaattatgaaaacttgcacaagaagctagaaattatctttttgtcttgtctagctacactaatatatagtgagtgaatagaatgaagggatgggctctggttaggcccatctaaactaactaattttgctaattacacaaatcaaacccaaactcacagcccaaaactcaagtgcagaggttatgacttccaagcctaatttgaccttcaaatcggcacaattagcccaagcttatgtctggcaaaattttagctattttccttagcttttgagggactacacatattctccatttgaagttctgtataatcctcttggtcctgcacaaggaagataggtcaaataagcacaaaatctgaaaataagcaacaattatcaattaagcccaattatttgcctaaggccaaaactcgattaaagtgagaaaataagaatccaagagaagtcaaataagctaagaaaaatataaaaatactaaattaaaaattctcaatcatgagactacatctaggtcttgacaacccaccaagtttcctctaacttatcacaaagttacaagtattcttcaatgtcatttatggcttttacaaagacaagctttaccctaagcttgacttaaccaatattggttgtcttaccaagccactgttggctctaaaaaaatcaacaagatttgttggaagtttgcacactgactaatattatatcgtcttacaaacagatatatctcaacattttagtctttttttctcaaggtttaaaaggtattttgagatcttagtatctatactaatatttacaagaaagaatgaaagagtgtttattctatttatagcctttatcttcaagtatttgtctctcaaacgggcagattcttcactttgttcttcgtctaaagtcttgagaccgttagagcatttaatgattacattaaatgcacgtcccttcttcatgaaaagttcatgcgaataggttggcatgtcttacaatttagtaggaaagtcacttgtttcatcatagcagatttgcatttgtgaagttcgccttttgatgaagattaacactttcagactatggacttcatttattcttcataggactttgacagatcctaagagaatgttttttacaagaaaaaatctcagacacaaagtattaaaggaaagtcttaaatgcactaaatcttatgccagatcttatatggatgtatcatttgaaaattcagacacaagaatacaaagaatgatctgataacacattagacacaacttttaccatttgtatttatttgtatctaattaaaataattaggagttttgatatgtctttaagacataaatgtcttttggcttaacactcttgtttcaaagcatgttgaacttcttctttggtttcaaaactcatcccttcaaagagagtttccatggatgttggacttcttcacgatcaaacatatgaccatattcaaaatcttcaaaattagacaaggtcaacattatgcatgtgtggtggcatgcagtattatggtatggttgttattggagagacaagcttagtttcttcgtcacgatcttcctggggttgtttgcataaaatttcatcttcatcctcactaaaaagaccaagttcttcattaggtaagccaaactccacaaaatcaagctatttggttgagttgatgggctagattctactgtaggggtactctagtatgcataaggttgatcctcggtaagaccagatgattgcgagtttaacaaattgatggaaaatggtgtagaaagaagttgagtaaaagaagatgtggttagtttccattcatttacttgtagttgggttaaatagaatgtctcttggtacaaatcgacgtgagtctatgatggggttgtatatgatgtacgtgaaacattggactggggatttgaataatattggggttcatgagatattggttgaggatttgggataggaagcgtatttagctcaatgtttgcatacaattcaacgcattcaagaacctcatgctggcaaaaaacaagaatcatacctttaatgtcttcgttgtcaacaagttgcactactgcaaattgagcattccacgtcaacaagttgcactgttgtaaacttaacctcccctttctcctcctacgtcacgtctctgactgtgaccgactgatgccttattctaattcccttgaggctttagaaattccttataaaagggcttagatatgaatgttgaactagaagttgatccagactccttgttctccatcacctttctcctgtccatcggttcctcaacctttatatggcaagttgcttgagaataaacatctatcatcatattcggctgtcgatagactagttactcgtggaacgaccttgctcgcaatcccttccaaaagatgactacaatcattctcttgtttgggtcaaccattcacacaaccaccccattgaatctcatgaaaaaatcctttagtgactcctctggctagtggcgcaaatcaaatagaatgaccattgtggatggtttctccttgctggttgtgaattatggtacgaaggtgcacaaaaaatcattgaagtgtgcaatggagttgtctggtaggttgttgatccagtctaaggctaccccgatcaaggtaccaacaaaaagcttgcacttcatttgattattctgccactgatcaacatctgggcacgaaaattctttaggtgccaattggggtcggttgatctatcaaaaggtgacatctttggaatgaggataattgcttggatttgtgaaggggttgaaattccttggttgttccaccgcaacgtcaccctccaaacaagaaaattaaggacaatatggctgggtttggtttggcttaaattatttatgaaatccgaaccagagcaaactaatccttttcagtttgattttgtgatttgaaaattatgttagtaagtattaaaaaaatgcttaaaatgtttgttattaattagacaaaacttgaataataactagttcaacaatcaacaatataaatggacaacaaaagttccaataattgaacttaaagtaaaacagtaattgttttcacgtttataatacttgaataataactattcaacttaaaagtgcaaatagtacataatacttgctttcaagttccaactactgaacttaaaaaaaaaacaataaaacaacattcataatacttatttccaaccatggaaacttagaaagttgaaatccaacaacaaaaccctaatcacaccaatagtttctaagggtgttcgtgttgtagtttggtttggttcggtttccccttgtcaaaccgcgaaccaaagtgaaccgcatggtttggaaaataaaaaaccaaaccaaactaatgactgtcggtttttctacagtttttgattttttggttagtttttggttttactcttggtttggtttgagaatttggacatgctacttgagggtattagtcagacttcgaagatcttaagcaagagggtgtcaaccgatcaaggaggccaaagagactatgttcaagcccgatcgttcgaaatacgatcaaggaggccaaaggtatacacaatccctcagtcttgagtgcgtaagcacaaagagactaagttcgagcccggttgtccggaatacgatgaaggaggccgaagaggtacatagtcctatagtctcgaatgtgtaaacacaaagggactaagtttgagcctgataatctagaatacgaccaaggaggtcgatgaggtacaataaagaatttagggatttttcaaattttcacaattaaataaattagaggttgtttgaccattggaaagctaaaataaatatgtcatgtgaaagtagtttttataaaaaattatttcttgctactgattcttgtttccaagttttaaatttaattttttaaaacaataaaaaaatattactatttaacacataatttatcccatgcatccctcgagaatatacgttcaaatctactaaaagtctaaaaccatacgttgatacgcacattgtataatttaataaaaggacttatacatgtttatataataatgcatattagtcaatataatatctcaaaatggttataactctgggaaaaaatcattaaagtcatatttaacatttgtgttcattatcataaaatacacaaaaggtatatctaataagttaccatgaaattatatttgatgcttagtctcaaacctgacttcctaaggacagtcaagttaaacatatacccttagaaattataatagattagtaataatttgtgaagtttaattaacatacttgtactatataaaatgtggaaaatacacatgccatttatgtgggaccttccacacacgtgtccaccctccacgtcagccctactacataggtatttaattatctataagtctcaaattatctatatgctctgatctacaagctgttacttatctataaggaaaccaattatatacaacctgtaattatttgttaaccttatcaacatgttaattatctataatggcccaaggcccacgctcatcctataaatacaggttccatctaacctctttacacattccattctcactcaagacactcacatctacctctcattcacggtgataaacacccttttgatcagccatacatgacactcttgacactcaatcactttattttctcaatatttgatgtacttacttgagcgtcagagtcctttccttttttttacaggtccccctctttaacaaggttgactcactatcgtccgacatgcagagtctgaaacccacttggaccacgtccccccttgtacgtggcaattccaaattttggtaagaacaatattgaaaacacattaacacaacaaattgtatgtgagaagacaattttctaagattaatttaatctaaataaataactaaataaaataagtgaaaaaataagatgaaaaaggaatgaagaaacaataatacaacatattcagcaaaaaaagaaaaacaataacacaacacaatcttaatagcaaactatcctaataaataacagatatagaatgcatattgtcataagtattccaaagaatacatcactactacatacaacactttctatgtcggttattgaacccatttaacgccagtttgaaaatagtctttgtagcgagtgtcgttgaaaggtaagactttcgacataggttgttgaaccgtcttagaacgggacattctaaggcagttgttagcctaaaactatcttcgaattcgcctttgaattctttttttacagcattctaagacggttctcctctatcaccgtcttagaattcgtgtctgctttttttggtttacaacattctaagacggttataggagagaacctttttagaatgtctcattctaagacggttctcctctataactgtcttagaatttgtttttgtttttttttttgtttacaacattgtaagatggttataggacagaactgttggatacagggggagctatttgaagaatgcaaatgaatcaagctttggttttgagctttcaacatgcaaaggatgccttgaagattgatttgtgttaaatgtgtagagaaaagaaattctggtcatccaagtgcattgcattcatatcattcaataattcaattaatttgattaataaaaatcacaaggctttagtaaaatgaccaagttttttatttgaattaaaggtttttggaaaaatggtttttgtactgacttaatcgattaccttaaaggtataatcgattattttgctcttagtctattttggaaaagttttcaagaacaatgtaatcgattacatatcggaataatcgattatttgacctttgttttcatataaactgcctcgatgaacactttaatcgattattaataggtagtaatcaattacacaactatatatgattttaagcagtgctggaagaatcgattaccaaagtgttgttatcgattatacaggcttaaatgaaaaagccatcttcctgtcttaatcgattaccaactttagtaatcgattacactatgtgtaaatgcttacaagatttgttgctttaatcgattaccaaatatagtaatcgattacttagttcaatctattttttaaagctttctggtttaatcgattaccaaaaattgtaatcgattacatagtgtattttgatatttttagcttcctgtcttaatcgattacaagacggaataatcgattatttttctcgttgctcatgtccagaaactttgttgaacactttaatcgattacaaggttaatttaatcgattacatgagttaaataatcgattatatggagcgtttaatcgattactgacaattacaaaagtttgttataaatagaaccatggcttagcttgttttgtaacttgatttattcgtattctgagcatacacaaactttctaaacacttccaaagtaattttctgggttctatgagttcttgcatcaactaaaacattcatgggtatttgagtgattctttaaagcaagaagtttctttcaaaggttaaggaagaagaatgttctgagtttgtttttgtctttcaacctgaattgttcattcatatgaatgtcattcactgaatcatcaggttgtttctttccttaactcattgattgtaattctgtttaccaattctgttgtaattggctattgtaattgggttcttctagcttgggactagagaagggttctctagcttaaagattagagtagtgttctctggatctttctccttagaagtctaatagggttttaaatttctgttctttatctagggttgataaaggggaggttattgtaaaagcttgtaagaatattttataatagtggaactaattcagtgtaaattagaagaaactggatgtagcttcatgttgttgaagtgaaccagtataaattgtttgtgttcttatttctatatctctattctcatcttattcattgatctttaattcttttaatcacattcattgttcaacaagttctgttttgatctactgaattcttgggctgagctatttgattgagtaaaaggtttcttggttttaaaagtgataaagatcctgaaactctgatttgaatttgattttaaaataccaaggttcaaccaattcacccccatcttggttgttgcgaagtattcctgttattttcaagaaccgtgttagaatattcaattctaagacggttgatgagtcactatttacctttattttgtcacctttctatactcattttaatccctgatttgtgtttaatcgtttatatttcacattgtttctcatttaggatttaattggaccgataattcagattttaactaatttggattttttagtttaactattccaatttttattttcagggcagtttaataattaaatgggcttggaattaattcatggacttgaagattggagtgccacgttagcatcattttccacatcagcattttatttcgttttattttgttttagtgattttttgggccaaaattgctaggaaaggcccattttcttttaggtcagacactagtatttatagaatactgtgcccatgcaaaaagatatagaattcacgctcagtttttttagggttttaggttttcgtttctgttggctattctgcttaagattttcgtttttgtttggattttctgtttcggaatactgtttcattttcgtttctgtcaatttcagtgcttatttcgtttctgcttcaggtgtctaatttcgttttctgcttttagtattttggttttcgtttaggttaaatttcgtttttgtatttgaatttcgtttctcttctagtttcgtttgatgttcgtctgctattcaattcttgtttctgttgcaattttcgaattaatggaaggctaaattttagggttggaccctaggacagattgcaaacctttaacggaggttctttgtacttgtaattccgttctgcttggttcttcctgttgggtctctgttctgtatcttttcgaattagagtcatgcttaatgattctgagttggttgattcagtattcttaggttgcttaatcctgagagcttaggcctgacgaggttcgcgtttgcttaattcgtgtagggaagttttaggttaattttctcttagtagattaatctggactacgaaggattaagttaggatagattatctttcgtgaactgaggacattagaggcgcaatctgttcaaaggtctgacttatttaatcactgcaattatttggtatttttgtttttattttatatactcttgcattctgtcaaaacccccattacacgtttaatcccttgacacagacaattgatcctagagagacgacctaggagtcacttcctagtactgcatttaattgtattaatttgaccgagtatgatcgcgatcaacggttcttaacctacaaccatcttagaattcatctttgattttttttatagccttataagacgattttttatgtaaacaaatattacatttttgtaaccattctaagacggttttacatgtgaaaaccgtcttagaaactctttttcctaaattattcaattttttataattataattaccataaatctaaacacacataaaccttataatataccacaaatagtccaaagagtactagtggagaatataaaaaaaatgaaattgtatattccattttattcatgatgaaaatcccttatactttttagagcattgctatgaaatatgtatacttaagtttcatctatgttttattaggtatgcttttcacaacatgcaatttccagcaatcacaattaagcacataaaataaacatatgaaccagttgtccttcttcttaattagattctccaaccctgcatacaaaattaaattaaatatttaatttggagtgtgttaagtaacaaataagaagttttccatttcctaaggccatgagaactgacaacatctctaaatgaggaatcaagagcagatataacatcatcctttattttctgcatgtaagagacctttaaataagagactacaaatggcaatcatacaattagacaatgacctagccatttaaaacaaggatcctccaaatccaaatcatgataactaaattccattttcaaagaacaaattaaaaatgtgaacaacatacatacgacatcatcattcatttgtcttttcactagtatttttttttaaaatcaatgcataattaaatcaatgtacttgcacccagactatacccctcttcatctgcaccaacccgaggcaatatactaccttcccatcaaaacaaattaaataaatgtagatgcctaaaaaagaaaaagtcaatgtagattgataagggcaatagtgtagacttttcaatacattattttaaatggttttcatgatacaactgttagtccttaatacaatatcatctaatgatttcatgatacaacttgaaaataataggaatactgcacaacaaccaagaggggggtgaattggttgaaccttggtattttaaaaatcaaattcaaatcagagtttcaggatctttatcacttttaaaaccaagaaaccttttactcaatcaaatagctcagtccaagaatcaatagatcaaaaccaaacttgttgaataaagaatgtgattcaaagaattaatgacaatgaataagatgagtatagagataaagaaataagaacacaagcaatttatactggttcacttcaaatcatgaagttacattcagtttcttctaattcacactgaattagagttccactatcataaaatattcttacaagcttttacaagaacctcccctttatcaaccctagataaagaacagaaatccagaaccctattagacttctaaagagaaagatccagagaacactactctgatctttaagctagagaacctttctctagtctcaagctttaagaaaacaattacaatagccaaaaacaacacaatttgtaaacaagattacaattactgagttaaggaaagaaacaacttgatgatccagtgaatgacatgcacatgaatgaacaattcaggttgaaagatgaaaaacaatctcagaacatcttcttccttagcctttgaaagaaacttcttgctttaaagaatcactcaaaaacccatgaatgttttagtgtaagcaagaactcatagaacccagaaaaatcacttagaacgtgtttagaaagcttgtgtatgctcagaatatgaattgattaagttacaaaacaagctgagccaaggttttatttataacaaacttttgcaactgtcagtaatcgattaaatgcgccatataattgattatttcactcatgtaatcgattaaatcaatctggtaatcgattaaagtcttcaacacaatttctggacatgagcaacgaacaaaataagagattatttcgtcttgtaatcgattaagatagaaagcttcaaaatatcaaaatacactatgtaatcgattacggattttgataatcaattaaaccaggaagctttataaaatagaatgcactatgtaatcgattactatattttggtaatcgattaatgcagcaaaactcctaaacataaacacatagtgtaatcgattacgatatgtggtaatcgattaaggcaggaagatagctttttcattttaagcctgtgtaatcgattactattcctttgtcatcgattcttccagcactacttgaaatcatgtataacaatgtaatcgattactacctattggtaatcgattaaagtgttcaccaaagcagtttatatgaaaacaaaggtcaaataatcgactattccgataggtaatcgattacattgttcttgaaaggttttacagaatgaactaagaaaaaaataatcgattatatccttaatgtaatcaactaagtcagtacaaaaatcattttccaaaaacctttgattcaaattaaaaccttagttgtttgttcaaagcttagtttgattttcatgaaaaatacttagttaaatgaatgaataaatgaatgaatgaatgcatggatcaatcagattgctttccttttacataaaattccaagtattcaaacatgtttgatagctcaaaaccaatcttgtatcaaagacttccaatcttcatgaagctccccctggattcaacaatctccccctttttggctttaaacatgccaaattcttgattgaccaattgttgaacttgaagctttataaatgaaattgaccatggaagactttgaattttcaaacctgaaattttacactgaccaagtgttaaagcatctgattccttttaatcatcattcacatgtattttgtgtatgattgattcattttaaacactcagctccccctaaattccataatccattcaagtcatattttgggaaaatttgaaacaaaaaacaggggcaaacaaagtagtatgcagagcatgctaaaattcaatcatttctctccctatttgtcttgttaaagtcaaaaacataaagggcacaatggataattgaaatggaaacttaatggaagttttatattaccaaaaggagccattacaaagtgaaattaaacataacaaagttaacaactaaaaaacaaagcatgaaaacttaaagaaacataggcctagaattttgctgaggcattatctgttatatttgcttcaattgtatctagcctatccctaatttctcctaaggcttcattagttttagccttcaaatcctgttgcatctgaatcaggttatccatcttctgcagcataagggcttcaaattgagaatacaagggctgttgtggatcccttgcttcatcttcaaaattagccacttgttcagcatcagcagcaggaggaggagcctgtggttgtccagccattatccagccttgtggagtcttttgcatccccatctttgtgaggtgtttttcctttatgaggttgttgctggaattggtatggtccacaacctcattttccacatcaatgttgaagtggtcaatgaatctagataccaagacaaaatatgggaaagggtaattgaccaacctcttggatttgagcatgatttcttcaaagataagaacccaattcataggtatagagttcttcagatcatacaccaattactggtcttcatctgtggcttcggcatgattagtggccctaggggttatcacataagtgatgatgtaatggagtaactgttgcgtactcggcaagtgcatcggtcgctcaagtaataaagtgataaagtagagttatcgtcccacgaggattggttgaccaattaaatcataaattcaatcgataagttggataataaataaagaatgaaataggttgtttttgtttgtgtgtgtgtgtagcaagataaactaaaaactaagtatgaacttacatgtatagacaaactatggaggttgataataagatatgtggttaagtagctagggcaatccacaccaaatgctccctacttcagttcatgcattgcctactactttcattaagcctaaattacccaacatgcatcttcaataataatagctaagtcctactcccgtagtgtcctcaaccctttaacccactctaataccctaatcccttagtgatattggttaggtcaagcattaaatgatgcattaaatggttgcaagcatacactcctatccctagttaatgtaaagcttgtcactttacccaagtccaagcataaggccccaacattcctattgccaaccccagctcttaatatctaactagagtgatcaattccaaagagagatagaacatgcattcaacagaataaaatgaaataacttggcattaataaaagatagcatccaatacaatcccaaaagaggttacattcggtgcttagcccttactacaatgaaaactagccaaacctcataatgggtggctgtgttacaaaagaaaatgacatacctagctgaagcaaggaagaagaagatggagaaccctccacttgaaccttcactctccctaaaccctcactaaggtatccaagcttcctaaaaccctattttgtgcagtttccccccaatagttcgtgcattcaatgctgagggtggaagtatatatagcccagcctgtgaaatctctgtattgcccttaattgctgcttctgtcgacctgtggcacctttggcgtgggtatggcgctccaggcgctaactttcagagaatatggcaccctaggcgtgaggttggcgccccaggcgctggttggaaatggcttttggcgccccaggcactggactctagagatcctagcgccccaggcgctgatttggcacttcaggcgccatgctccagtgcttttggcacctctggcgcgagactggcgcttcaggcgccagcttccagtgtgaatggcgctccaggcgccacatgtggcgccatcagtgccacagcttctgcagacttggctcttttcttctaatttttgcttagttttggcacttgtggttgctttcctgtcaattcatcacattagctcaaaccataacaaaacaaggcaattatccatgcttcatgcttaattcttgctctaaaaagcttaggaaaaccttatatgctaggcgcatatcagtaacctatcctccgggttcataggtccagtacccagcctgtttctaagttgcatataggggtcatgcaacatctccctataggtatccaataggttgtacccatcaggttgttcatcaaacttcctagccccctcataaatcaatccagcaactgtctcccaaacttcatgggtgatttccatagtaacccccttaaccttggtgatcatggtcccattcatagaccctttagcacaggtataaaataccttcaccaaatcaaggtaaaaagtacccttcatctctagaaatctcctaagaccttgggcctctaggaatgcagggaattggaatccttcccttataaaccaattcaagtctaggtatttgggtgaggctacaggcttagtggcattgaattgtaaatagttcatcttatcagactcatttgaaaaccataagtccagcttattttggggtggaggaggagaaggattggatgatgattctccaacctttctctttgaggatctagcacgtttaggtgtagggttagacatgtttatagagaggtttagactcaggaaaaactcagaaaaactcagaaatttcagacagagaagaaactaaggtgcagagttttttttttttttttgttgatgcaaggcactatttataggcttgtttagcacaaataatgtatattttaatgaatttaatcgattaacccgtggtgtaatcgattattatagcaagtttatcagagtgcagagtattttgcagatcaacatgaatattgggttattttagtgatgaaggcagcaatgaagtccaatttaacatggaaaggcacacttcaaacaggctagcatatattggattcatcaagaatgcctagcatgtttctaagtgcataaaatctatctctagccaatggtttagtgaataaatcaactagttggttatgggtatcaatgaactcaactttgatattacctttctgaacatgatctctaaggaaatgatgccttatctcaatatgcttggcccttgaatgcattattggattctttgatatgttaatagcacttgtgttgtcacatatcagaggtatttcattcagttcaactccaaaatcttgcatttgttgcttcaatcataggctatgtgcacaacaactttcagctgagatatattcagcttccgcagttgacaaagcaacacaagattgtttcttgcaatgccatgagatcaatgaacttccaagaagatgacaagtgtcacttgtactttttctatctaacttgcaacctgcaaagtcagaataagaatatccaacaatattaattgaagcacctttgggataccaaagaccaacttttggtgtagctttgagatatttgaggatcctcttgattgctgtaagatgagactctttgggatttacttgatatcttgcacacatgcaaacacttagcattatatcaggtctactagctgtcaagtatagcaaagatccaatcattcctctgaactttaactcatcaaccttttttccattttcatcaaaatcaagatatgttgatgtagccactggagttgcaacattcttgcttttctccatttcaaacttcttaataacttcaaggcaatatttggattgattaagaaatgtttcattcttcatttgcttcacttgaagtctaagaaagaatgttatttctcccatcattgacattttaaattctttctgaatagctgtggaaaattccttacataacaaatgattagtagaacaaaaaattatgtcatcaacataaacttgaagcaataagatatcattgacataccttttgatgaacaaggttttgtcaacatggccccttgtgaaaaattgttcaagcagaaatttgcttagtcttttataccatgatttaggagcttgcttcaaaccatagagggcctttttcagtttaaaacatagtttggatgtttaaaatcagtaaaaccaggaggttgttcaatatatatatcctcctcaatgtatccatttaaaaaggcacttttaacatccatttgaaaaagtttgaaatccatgagacatgcatatgcaagcaataacctgattacttccaatcttgcaactggagcatacgtttcttcatagtctatgccttcttcttggttgtaacctttagcaaccaatctagctttatttctgactatgattccactttcatcaagtttaattctaaaaacccattttgtgccaatgggtttaagagaagatggtctaggaacaagttcccaaacttcatttctcttaaattgatttaactcatcatgcatggtatgcatccaatgttcatcattcaaggcttgatctatattcttaggttcaatttgagaaacaaaagtcatattacaacataggtttcttaatgaagatctagtagatactccctttgaaacttcacctatgatgttgtcaagtgataggtctcatgttgttctccaatctttaggcacttgaacaggaattgatggttttgcttcagcacttggttcttctttctctttagttaaggaatcatcttgctgaataaattcttccattggacttgcgtctacatcaaacttcttttcctctttaaagggattagactcatcacaaattacatgtacagattcttccatgcacattgttcttttattgaatactctataagctttactacgtaatgaatatccaaggaaaattgcttcatcaaccttagcatcaaattttccaagtgattctttcccattgttcaatacaaaacacttgcaaccaaaaactctcaagtgagaaatgttgggttttctacctttgtatagctcataaggggttttctttaaaataggccttataagtaatcttttcaaagtgtagcatactgtacttacagcatcagcccaaaaatatttaggcaaatttgtctcattaagaagtgttcttgctacttgttcaagagatctgtttttcctctccataacaccattttgttggggtgttcttggagctgaaaaattgtggttaattccattttcttcacaaaatttttcaaaatgttcattttggaattcaccaccatgatcacttcttattgagataatttttacctttttcattttgtgcaagcttatccatttatctaaatgtaaggaaagcatcacttttggatttcaaaaacagagtccaagtgaatctagagtaatcatccacaattacaagcccataataattgccacctaaactcattgttctagaaggaacaaacaagtcaatatgcagtaattcaagtggtctagaggtagaaacaatgtttttactttgaaaagagttcttagattgtttccccttttgacaaacatcacaaagtttgtccttctcaaaattgagtttaggcaactcaattactaaatcttttataataagcttgtttatgtggtgcatgtttatgtgactagcccttctatgccactgccaagattcatcaatcttgcttatgagacaagaagtgttgtggaagaatgcatgatcaattgaaagcaagtaaatgttacctttccttttacctatatgaattatttcaccacttttcctatcacaaatcatgcagtagttttcattgaaggtgactttaaatcctttgtcacaaagttggcttatgcttaagagattgtgcttcaaaccttctacatagagaacattcttaatctttgtttttaagctgtctccaatgttaccttctccaatgatcttgcctttattattatccccataagtgacatatcctccatctttaagtgtcaagtttgtaagcatggacatgtctccagtcatatgtctagagcatccactgtcaaggtaccaagttgaggatctagctcttagacatacctgcaaaaatcaaatcaatgtacaaaggaaggtacccaattaaggttgggtccataggggttagcatttttctttttctttggaatccaaatgcaatcaccatttcgtacatagaatctcctagcatagcatttatatgaagtgtgtcccttttccatacaatagttgcaagttgccaaggccttgttagacacttcaagatcttgatgtttaattcttcagtatcaaagatctccctaagacccaatagatggttgacaatatgagtgaatcttgtctgcaattgaaaaatgctttcattggtgttcatcttgaacatcccatactcatggatcaaagcatgcttccttgatctcctaacttcttcagttccttcatgactaattttcagcatctcccacatttcttttgcactcttatatctcactgtcctaaaaaattcatcagaggaaagtgcagaggtgatcatattttgggctttaaaatcatgttgtgcagccttttgttcagcttcagtcatctcatcccattctttgggaatcaatccattggcaacaattttcttcggaatgaaaggacccttttctataacattccaagcacttgggtcatttgattgagtaaggatttccattctatttttccaaaaactgaaatgttccccttcaaacataggaggcttgtttaaagaagcaccttccttgaaggttatttatgaggtattcatttttctttttgaagaaaactagtgatcttgaataactctcaagaactagctcttgatgccaattgaaaataataggaatacttgcaatgaatgtgattcaaagaactaaattcaatgaataagatgagtatagagataaagaaataagaacacaagcaatttatattggttaacttcaaatcatgaagctacatccagtttcttctaactcacactgaattagagttccgctatcataaaatattcttacaagcttttacaagaacctcccctttatcaaccctagataaagaacagaaattcaaaaccctattagacttctaaggagaaagatccagagaacacttctttgatctttaagctagagaacccttctctagtcccaagctttaagaaaacaattacaatagcaaaaaacaacacaatttgtaaacaagattacaattactatgttaaggaaagaaacaacctgatgatccagtgaatgacatgcacatgaatgaacaattcaggttgaaagatgaaaaacaatctcagaacatattcttccttaacctttggaagaaacttcttgctttaaagaatcactcaaaaacccatgaatgttttagtgtaagcaagaactcatagaacccagaaaaatcacttagaacatgtttagaaagcttgtgtatgctcagaatacgaattgatcaagttacaaagcaagctgagccaaggttctatttatgacaaacttttgtaactgtcagtaatcaattaaacgcgccatataatcgattatttcactcatgtaatcgattaaatcaatctggtaatcgattaaagtgttcaacacaatttctggacatgagcaacgaacaaaataatcgattattccgtcttgtaatcgattaagacagaaagcttctaaatatcaaaatacactatgtaatcgattacggattctgattatcgattaaaccaggaagctttataaaacataatgcactatgtaatcgattactatattttggtaatggattaatgcagcaaaacttatagacataaacacatagtgtaatcgattacgatatgtggtaatcgattaaggcaagaagatagctttttcagcatctcccacaattcttttgcactcttacatctcactgtcctgagaaattcatcagaggaaagtgcagaggtgatcatatttttggctttaaaatcatattgtgcagccttttgtttagcttcagtcatatcatcccattctttgggaatcaattcattggcaacaattttctttggaatgaaaggacccttttctataacattccaagcacctgggtcatttgattgagtaaagattttcattctatttttccaaaaactgaaatgttccccttcaaacataggaggcctgtttaaagaagcaccttccttgaaggttatttctgaggtattcatttttctttttgaagaaaactagtgatcttgaataactctcaagaaccagctcctgatgccaattgaaaataataggaatactcgcaatgaatgtgattcaaagaactaaattcaatgaataagaggagtataacgataaagaaataagaacacaagcaatttatactggttaacttcaaatcatgaagctacatccagtttcttctaattcacactgaattagagttccactatcataaaatattcttacaagattttacaagaacctcccctttatcaaccctagataaagaacagaaattcaaaaccctattagacttctaaggagaaagatccagagagcactactctgatctttaagttagagaacccttctctagtcccaagctttaagaaaacaattagaatagccaaaaacaacacaatttgtaaacaagattacaattactatgttaaggaaagaaacaacctgatgatccagtgaatgacatgcacatgaatgaacaattcaggttgaaagatgaaaaacaatctcagaacatcttcttccttaacctttgaaagaaacttcttgctttaaaggatcactcaaaaacccatgaatgttttagtgtaagcaagaactcatagaacccagaaaaatcaattagaacgtgtttagaaagcttgtgtatgctcagaatacgaattgatcaagttacaaagcaagatgagccaaggttctatttataacaaacttttgtaactgtcagtaatcgattaaacgcgccatataatcgattatttcactcatgtaatcgattaaatcaatttcgtaatcgattaaagtcttcaacacaatttttggacatgagcaacgaacaaaataatcgattattccgtcttgtaatcgattaagacataaagctttaaaatatcaaaatacactatgtaatcgactacggattctgataatcgattaaaccaggaagctttataaaacataatgcactatgtaatcgattactatattttggtaatcgattaatgcagcataacttatagacataaaaacatagtgtaatcaattacgatatatggtagtcgattaaggtaagaagatagctttttcattttaagcctgtgtaatcgattattgttccttggtaatcgattcttccagcactgcttgaaatcatgtatagcaatgtaatcgattactacctattggtaatcgattaaagtgttcatcaaagcagtttatatgaaaacaaaggtcaaataatcgactattccgataggtaatcgattacattgtcttgaaaggttttccagaatgaactaagaacaaaataattgattatatccttaatgtaatcgattaagtcagtacaaaaatcatttttccaaaaacctttgatttaaattaaaaccttagttgtttgttcaaagcttagtttgattttcatgaaaaatacttagttaaatcaacgaatgaatgaatgaatgcatggatcaatccgattgctttccttttacataaaattgcaagtcttcaagcatgtttgatagctcaaaaccaatcttgtatcaaagacttccaatcttcatgaagctccctttggattcaacacaactgtcatttttaaggtagttaaataatattagactaaaaaaattgaactgtatttgaagcacataaagcctaaccaatcatggtactaattagattcataatactcacttgatttttgatgatgatgcccccaactcttaaattatcttggctgatgaagccatgaatgtgtccatgggcataagggatcttgcaaggtattcctgggcattttccaaacaaaactatagtataggcataataagtataacaaaagaaataaaacaagatagggtgactaatgtggtagccataagcttaagaaataaaacaataaaggtaaaaaataaaacaaatatataatacatgaagaattgatgagttagcaatcatctctatcactcgttaattaattatattttttgacttaaatttctttttctttcaatcaatattcttctctgccaaggtattaatattaatacatatatatcactttctttttcctttttttatcatctttcccactcacctacaatacattaattaacattacattaataaagttgaattttaacacaagatagggtagacatgcataatgttcatgcttgaaccctaaagatgaatctctacaaggaaagatccaaatcccaacattcaattgcctcaattgattaaaagaccaccactagaagtgagaaaacaatcataaaggttgagttttttcctataaaaatgacaactttgcttttgagagaactctagctaggtaaatcatctacatgatgaactcatcaagttagcacaagaaaggtgtgacacacactgagaaattaagagatgagatagataagttagtacttgtaagtcaatcaacaacatcaccaccaccccagttgttgctatcggtagctgctgatgattctaacttcatgttgttgatctctgcagctagctaaagacaagtttgaccctaaagatggaacttaacataaaaataaaatttaacaaagataaatagacaaaggctaactaactagaagggaaacatagagtgattggcaacaaataccaaacaactaactattaatgctatcatcaaatgaattagaaagagaaaaaggtagagagaaaagttaatggttgtagcatgaacagattagaggcatacatgtggcaagtatgatacactttctctttttttatttaatatttacatttaattagtattgttcaataaagtaaagatacttatattgttattttaattaaagattattaacattgctaacttttataatagttattttaaaatgtgtacataaaataaatttaattaattgacaatatacaaatacttacctgaaaataatgtgagacattgataactcaaacaagggtgagaagtatcacaaccagattgaagtgaagtgttgttgaataactagaaggataactagaaggtgctcaggatatttgtccttcagcaatctaattaatgtaagaagtgaagtcaaatgttagaacttagaataccatatatatatatatatcatcattggagtaaaaatgcaatacaagtgcaaactatggttcaaaaaagaaaaagaaaaaaaaaactcatgaaagtgattataggaaggaaaaaaaaaaaaacaatagtacacaaaccacaatgtatgaatttcataagcaagaaaacaacccagcacatgtagcaaccttaaatagtgcagctactggagtctcaaaattaaactttgagagttacttccataagtaggacctatagcatgtaaaataaggcaacatcagatataagataagcttagagcacaaacaccaaccaaatctatcttgcacaatataaatgtgtagtaaggagaacttaaaaggagaaagggtttttgtcttccaaatctggtgaatatgctgcaagcaatctaattcttttagtcatgcatattatacaagcctggaccaataagagtgaaactcatatgcacaaacaaataaaacaatcaaacactgttaagctagcaataaacacatatacaaggaaattggaagtcataaaagatgcaatcatatgatatctttagtgaacttcatgttgaataagttgacttctggaatacaaaagcacacaaataaaaaaaaaactgattcattttacataaaacatcacatgaagcacatagctatcatcttcctcattcctttgccattcttgtcttaattttgtaaaaaaaaaaacactaaaaaaaattccagaatggtaagttcatttagaattaccgatttggatttctgagtgctccaaagttgtgttgaactcatccaattcttattcttagagctttcattttcatttcctccagaactggttttaagagggagatcttgcattcttgaatacttcattttgccacgcttgtctctgttcctagaaataaaagtttcagttaatggaaagaacaaacaatcatagggaaacaaaagcgtgcgttctacttaagacacaaggagaaggtgatatattagcaaggggacctaaaatcactaacattttttaaatattaaatcttagatgaaattgagcatattcttactcatgctcgaggattgtttgtggagccttctcattgtccacaccttgaacacgaggaaaccttgtgttcttaataatctccatcacatcagaatttattcttagttcatcaccttctttctctcctgaggctaaatggctacagataaagcaaaagctagtttcatgcacatacatactaattgagatggatccttgcaaataaaagccaaaataactcctctatttaagccaatttcaagtaacaatcgtggttgccaggaattaatctcggaaataaaaattggaaatatgactaactaaaaattcaccttatttataagattacccatcaatcctctgccaacacaaaccactttcatattttgaatgcaacacataacataatagtgatgtagctaaatctaaacaaaacatgatcaagttatatcaattagcgaaaggggtagggtttgtatgtatgtaccttctcatccttgtccactgccatgtagtcagtctgctttactttaggtcattagctttaatatttcccatcccatattgtaattgtgggctaattcactggctttcttcctagcatgcctcatgtataacttggtaccaaaggatctatcacaatcattaaattttccaagaataattccactaaaattgactaaagaaccagttgtatttaaaaattaagagctaataattctaatttacaccaacattggagcttgaagcagcatttccactaaaaaaattaagaaattatctcagataccaataattaattgtgcaagattcaccaatcatcacctttgtccaccacaacctcaaagcattattaatgttttattttgttagtcaagatatagttggagtaagattaatgcaaaagacgaagctttttaatcatggaataacaaatgaataaacacactgagacatagtgtaatagcttgtaaaataaattaaaaaaaaaaagaaaaatatgacattatcttaccgagtctgaagttgattcctgctttgggattataagtgttgtgatatggaatacacttttttttctagagcacccaaattgcaagcataaataactgttaaaatcaccatgcaagagatttttctagaacttggaagcacacaaaactacaacatctcttaccaaggatcctgcaagaacaccacatgtctctaagttcttctgtgtgttttccaaagctaatctcaaaaaatcttccatcattttgacagcctgtgacataaagtgaaattagaataacttttaccaagtataataagttcataactaaaaaagccaacacaaatatgaacaaatcacaataaatgaccaagaaaatccaagatatatgtcacacttcaaatagaaaactaaaaatgagcttataatatgtaggtgtcgatatgtagttgaaccaagtccagaatcatgagataatttagctggtcctggccttggatttgcaccttttgaaggaggaataggagcatgctctggacagagaataatagatatataaaaaagaaggaacaagtacaattatatgcataaggggtcattggatgaagcaaattctcaccatgtgatatatattatagctagctttgggcccccagtatgagtaagcacctatgacaaagttgtatgctatttaacctgcaaatacattcaattaatggaataaaataaacaaagtaaaataatatgactgctaaaaataaaatacatatatgatattaacaaatgaaagttcacagggatgtaagctatccatatagcagcctctgacatgaatttactaacaaaataaggtaaataatacaaaatctgtcaaagcatactgtagttagtgggagaaagaagtacctagaacattgacgacataaaccttatcaagcaaaaattctttcatatcattgaaaaatctcaagaacttctcaaatatttgggttgtagattttgacctaaaataagaatcagccagatagaaatgttaatatatcagccactaaatgatggatgtcaaagtaagtattcttacttgggtttaggtaatgcgtaattcttagataccttgaactcatgatgcaactgtttcaggtgttagtgtcttttttgagtcagtaggaacaaaacctagacccacatgtagttagagatgaaaaccagtaatagggaaagacgagtttatggaagctgattatttcacgagtttctttggcacaagaatcaccaataccagccaacaatcaaattcatgaagcttttgttgatttaagagaggaatctcttgaagaatgaacattggatcaagcttggttttgtgctttcaacatgctttgaagctttggtgatcaatttgtgattaatgtaaaaggaagaagtattttctgatgatccatgtgcataacattcatatcattcatttagttaatcaaattgagttttaatatacacaagcatgtggtaaattaggcaagtttaaatctaagtttttggaaaaataagttcttactgatttaatcgattacactaagataagaatcgattattttgttctttgtgccttctggaaaacttttcaagaacaatgtaatcgattatgtatcggattaatcaattattttagctataatttcatataaactgatataatgaatactttaatcgattaccaataattagtaatcgattacataggctaaataggaaatatcatctctctgtcttaatcgattatcacagatagtaatcgtttacagtatatgcctatgattaacatgttatgctgcattaatcgattaccaaatgtagtaatcgattacaaagtacaaattgttttatgaagccttctgacttaatcgattaccaaaatccataatcgattacatagtgtatttcaaaaataggagcttgctgtcttaattgattaccagacgagataatcgattattctatttgttgcacaaacccagaacatctattgaacagtttaatcgattacagtcttgaaataatcaattacatatgtgaattaatcgattacaagagcgtatgtaatcgatcactgacgattagaaagcttattataaagagaacccatgctcagctttttcactaacttgatcaattcgtatactaagcattctaaggctttcaaaacattcttgtagtgatttttctgggttcattgagttcttgctttcaaaaaatacttatgggtttttgaaggattagtgaagcaagattttctttttcaaagcttgaggaaagtgatgttctaagtttgaaatcattcttctacctggtgaaatcattcatatgcatattgttcattggatcatcatgtgacttctttcgttaatctttgaaattgtaattctgttttgatttttggttttggtttgtctattgtaaatgggtgtcttgtttgtaatctagagatagagtttctctaggggaattgctgagtagtgttctcggtgggttgtctttaagaatctaatagtgttttagatttctgaattttatctagggttgatatagagagactttgtaataacttgtaagaactgaaatttacaatagtggaactccattctagtgttgagtggaagaaaactggatgtagcttcatagtgtttgaagtgaagcagtataaatctttgtgtgttgttcttattctacttattagctatattttatctttcttgtttgtgaatttttgttattaaacaaattcttgaagtattacatattttgggttgaactttggattgaataaaggttcttggtttcaaaagtgataaagatccaaaagggcaaaactctgattttgatcaagaaaatttttaaattaccaagcctaaccaattcacccccctcttggttaagtgtgaagtgtttccatattttacaatttgtaacaccccggacgtctccggtatgttatcatcaatgatatccataacacactatcagcgttaactacgcgcggtgcggaagcgatagaatcgtttatcttgattacattatgcatggaatataaaaaccacataacaaagagcataaaacaagcccctgctgatccagatcaaacataaacaactgtataggcagatacataaaaccaaacaaataaagtcaggagggaacatacttatatacatcatcatcaactgtacatatacatgctcaaaacaagaccacagctaggtcatacaacaaatatgtacagtacaaatgggtatacacataccctacaactacacagagatctaagaccagcttcaactcttaaagctctgctctggtcttctactacagcctctcatccaacctatcaggttcactagggcctcctgccctgaggtcgctcctctcctctagaaaaagcacctgaaaaccacaaaccccacacagggtgagacaaatgtctcagtaaactcagggttctgggagatcctccctgaccctggttcaccaccaagcacacacacaaaacatagtaacagagccaaggatatcatccttgctcacacatacgaaacctaggatatcatcctagtttccacacaccccagccatctgggtttagaacaggatgctctcagcatcagaggaattctacctcatcatggctctcacagccatctctaactggatgctctcagcatccgaggtaatccacctcgtcatgactctctcagccatctcacagagatcaaagccatacccatggcaccagtatctcatattggctctcatagcctgtctcatagaggtacctatcatgaatgtcatcccctggacacttctcaacacaagagaggcaccgcctctgtatcatacaaacattgcctgaggagatccctcaactcaagactctgaccatacaaacattgcctgaggagatccctccactcaggactttgagaatacagacattgcctgaagagatccctcaactcaggactctgagaatacagacatggctcatctaagaggccttaggctctagtccccctcgggaagccctctcttagagatacaacatatctgtctatcatctggcctgggaataccctccaggactttcacaacacatgcctgggcaagaacctcctttacagggcaatcacatccaggacttccacatacactggcctggaaagaacctcctttacagggcaatcacatccaggactttcacaaatattggcctgaggataatcactcaagacttccaacatctttgcctaaggaggaacatccacatagttccatctgtcctcaggacttaggtggagagcagtgacacctcccaaggaatctcagctattccagggagtcctcaaactctacctctggctagggaacctcaactagcctgatactcatccagtatcctctaggttccatcacagaccatctcatgatctgcattccctcaaaggcccacggcctcacacctgccatatcaggtgtctcataaccctcacactgtatcagtatctatcctagggttcatcattacagcccagcacacactaggcagtcacatattccataaatccagaacggtctgagattcactcaaagcaccgttcatcagcctctcaggctcagaacacatgcatatacatatatcatacatcacccatcaggtggcaaccagaataaggggaaaaccccagaacaatgagcttacctggctagccgtgcctcacagctctagcctccactgatggtctgctcctctgacacccactgtgtcaagccctacaaacacacatcacagaccattccagcatataatcatgcataagctcatcagacagtcatcaactgcctcaagcaaggaacctcagtcctttatatcaactcaggttatctaacctaaggttcctcaggctcatccctcaacaagcctttccatagaccctcagtggtctatctcagatcaaacatggcctcagagtccccacagactcaacacaagccatccacaccgagcttctcagctcacataacccaacaactcagggtttctcagggcttgaacggttcaaatcacaggacaccgttaccatggcctctcaggcacaacaagcccatcactaaggctcttgcatgtctcagtcaaataactcagtccaagtcacacatgccctcacctagagccaaaaccaacagtcaccaaatcacaaactgaaagctaatccttcctcctcatatcattctaaacacttctctcaactggacccagagctaatcttgccctatcatagatgggtcactattcacaggaaacccccaaatccaaaatcaatcggagaaactcgagtttcttacctcagaactgatgaggaaggcctctgggctgctctcccgagccctggtgccgctgaaccaccgccgttcctcgccaaactcgaactttcatccacctctctggaggttcctcagaatatggaggttttggtaaaagggaggaaggattctcgctctcacttggtttctagagggattaaagggtccaggaagcatttagggtcatcaagcaaggtcatgggagcttggggagctctcccatggttgctggagtccagaggaagaagaaaatcatttcttctcctcccaaaacgcgatccccctttaaatatagtctgcaccgaccttcccgcgcgatccgcgcgggataccgcgccagctgcagaaactgtggcgccatcagcgccaccctggcgctcccagcgccagcttctagagaccctggcgccctcagcgccaatcccgcgccatcagcgccagaaacccgagacattggcgctaccagcgtcatcctggcgcccttggcgccagattccagagtgcatggcgctgttcgcgccatccgtgccagacctcagacacatttttcctgttcctcttctggccctaaccgtgccacacatggcgccaaccgcgccagtcttgagggtccttacacaattggcatcaagagctaggtcttgtaagttactcaagatcattttttttttttcaaaaatgaatacttcacaaataatcttcaagaaaggtgcatccttaaatagacctcctttgtttgagggggagcatttcagtttttggaaaaataggatgaagatctttattcaaaccaatgatccaggagcatggaatgcaatagaaaagggtcctagggtgcccatcaaggtggttgataataacatgattcccaaagattgggatgagatgaatgatgatgaaaaaagaattgttcagtatgattttaaagctaagaacatgataaccactgttgaaaatgaataaaatacttcaacacaaccaagaggggggtgaattggttgaatcttggtaaattaaaattttaaaatcagagttaccacaggatctttattactttaaaaattgtttcaaaaaccaagaatcaatattcaatcaaattcatttttcaagaagaatagaaaacaaagtataactttctgagcaatgagattgatttgcaaacaaagcaattaagagatgaataggtgagaagaaagattagccacagatttttatactggttcacttcaaaaactatgaagctacatccagttcttctactcaacactagagtagagttccattattgcaaaaatattcttacaagcaattacaagcctctctttatcaaccctagaaaaagttcagaagtctaaaacactattagacccttagagaccaaaacccacactgagaacactactcaactgtccttagagaaacactatctctaaacatgtaagaaacccatttacaatagactaatctttacaaaaattcaaataacagttttacaccttcaaagaataaggaaagatatcacctgataatccaagaactcatgcaaatgaatgattcaataggttgaatgacagattacaaactcaatgcattcctttccttatgctttgatgaacaatgatgcttcacttctttgaatcaaaaacccataagaatttgtgaagcccagatgccttttgaaactcagaaaatcactaatgaaagcttgtgaatgtttgtgaatgctcagatatcgaaattctcaagttacaaaaacacagagcagtgggttctatttgtaacagctttctaactgaaagtaatcgattaaacacgctcctgtaatcgattatttagcatatgtaatcgattaaagtgctcctgatgtgttctgagtttaggctatgaacaatataatcgattattccttgaagtaatcgattaaaccagacagacatgtttttttctaaatgcattgattaatcgattactgactatggtaattgattaagacagtcagtcacatattttcaaatgaactatgtaatcgattaaaacgatatgtaatcgattacctcagtagaacatgtttatcataggcacggatgtaatcgattaagacagtcaacatgattttcctattttggcctatgtaatcgattactatgttcttgatttgttttctaaaaggcacgaagaacaaaatatcaatgtcattatctttgtaatcgattaatgcagtaaagattcatttttccaaaaactttgtttgttaaatgcctttctagttaattgcttttactaagacctttaatctaacaatcctagatgaatgattcatgcatgatatgctcaattggattatcagatcataaattcccttttacattaatcaaattggtcttcaagctttcttggaacttttatccttgagcacgttgaaagaacaaaacacttagaccttgattccttgctcatttgtacatggcttcacttgaatcaacatctgctctttcttctgatgaattcttcaaaactgttagatgtacaagtgccaaagagatgtgggagatgctagagatcacccatgaaggaactaaggaagtgaggagatcaagaaagcactcattgatacatgaatatgagatgtttaagatgaatcaaaacgaaagtatttctcaactccaaacaagattcacacatatagtgaatcatcttttgggacttgggaagacatttgatgctgaagaattgaacatcaaaatcttgaagtgcctcattagagcatggcaaccaaaagtgacagccatcaaggaatctaaagatctttcaaaaattaccatggctgccctctttggtaagttgcttgactatgagtttgaattatctcaactaacctttggtaaagatgcagaaagaaaaggcaaaggaatagcactaaaaactgcagcacccaaggtggaaaaagatgaaaactcaagtgaagaggaagatgaagaaagcatgaacttaattgtgaaaaagttcagcaagtttctaaagaagaacaagggcaaaagatttacaagaaacaacaggaacaattctaccaacaacaacactagcaactccaagaagattgacaacaactttacatgctttgaatgtggtaaacctggctacataaaatcagaatgttcaatctacttgaagaaacaacaaagtgacagcaaaggcaagagggaaacaaagccaagaagagcctacattgcttgggaggacaatgaatcctcaacttctgaatcctccactgaattagaagaagccaacatgtgcctcacctcaattgttaatgaagaaaatgatgatcttttggatgaagatgatgaggtaacttctgaacttgatcaagttatttttgcttttcaagaaatgcacaaagaggccaaaaagcttgctaaatccaacaacaagcttaagaaaagtattgaggatcatcttgcaaaaataatggtattacaaactgaagtttgtaacttgaaggaagaaaatgagaaacttacttcaagctacaaatcaagtggttgtattagtacctcttcctctacatcaagtgataaatatgaaatcctgcaaaaagtttttgatgaatatagttgaatcaagaagaaaaatacttgcaggttgtttcaaagaacaaagagttgattgatatcttggaaaaactcaacaaaggaaaatttgatttgaatgaaatgttgagtgcttaaaaatagtttggtgacacttctagtttagggtataaaaagagttttaaaaatgttcaaaagacaacatttatacctccaaaacagaagaaaaagaagaaaccaagattcaatcaaaatcggttctttggaaactcatataaggctgtgatttgtcactattgtatggaaaaaggtcatacatcttaccaatgttttgcaagaagattttttgtcccagatggtgagtacatttggatagaaaagaaaaggcaaacagctaacccacttggacccaaaatcaaatgggttccttctcctttgaagtaatttgttcttgttgtaggtgtgtcttagagcaagctcttctttatagtatcttgatagtggatgctcaagacatatgaccggtgacaagtccttgctcaaaaatcttacccttaaagatggggcctatgtcacttatggagacaacaacaaaggaaagatcataggtgaaggaagcattggtgatagcttgaatacaaaaatcagcaatgtactctatgttgaaggcttgaagcacaatctacttagtataagccaattatgtgacaaaggctataaaatttcattcaatcaagattgctgcataatttgtgatggtaaaagtggagaggtaattcacattggcaaaaggaaaggtaacatttacttgctttctatagatcatgcattatttcacaagaccacatgcttaatgagtaagttagatgaaacatggttgtggcataggagagctagccatattaatatgcatcatatgaataaactcattaagaaggacttagttattggtctaccaaaactcaaatttgagaaggacaaattatgtgatgcatgtcaaaaggggaaacaaaccaaaatctcttttcaaaatacaaacattgtttccacctcaagaccacttgaactattgcacattgatttgtttggtccttcaagaactatgagtttaggtggtaattactatggacttgttattgcagatgattactctagattcacatggactttgtttttgaaatccaagagtgatgctttccattcttttagaaaattagccaaacttgttcaaaatgagaaagatggtaaaattatctcaattagaagtgatcatggtggagaattccaaaatgaacattttgaaaaattctgtgaggaaaatggaattaaccataactttttagctccaagaacaccccaacaaaatggtgtcatggagaggaaaaatagatcacttgaagaaggtgctagaacacttctaaatgagacaaatttaccaaaatatttttgcgctgatgcagtaattactgtttgctacactttaaatagattactcataagacccatattgaagaaaacatcttatgagttatacaaaggaagaaagcccaatatttctcatttgagaacttttggctgcaagtgttttgttttaaacaatggaaaataatcactaggaaagtttgatgcaaaggctgatgaagccatatttcttggatattcattgcaaaataaagcatatagagttttcaacaaaaggatcatgtacatagaagaatctatccatgtaatttgtgatgaatctaacccctcaaaaaaggaaaatgattgtgatgaagatacaggccaaatagagcaaaatgttcagcttgagaaaatgtctattaatcaaaaggatgaacctagtgctgaagaaggtccatcaacaccaaatcaaaggcctaaagaatggagaaccacaagagatctttcactagacaatatcattggtaaagtatcaaagggagtctctactagatcttctcttagaaatttatgttgtgacatggcctttgtatctcaaattaaaccaaaagatataaatcatgccttgcaagataaacattggatgcatgccatgcatgatgaactgaatcaattgaaaagaaatgaagtttgggaacttgttccaagaccttcatcaatcatgcctattggtacaaagtgggtttttagaaacaaacttgatgaaagtggaatcatagttagaaataaggctagattggttgctaaaggttacaaccaagaggaaggcattgactatgaggaaacgtttgctccagtagcaagattggaagctattaggctattacttgcatatgcatgcataatgggtttcaaactttttcaaatggatgtcaaaagtgcattttgaatggttacataaaggaggacatatatgttgaacaatctccaagtttttctgattttaagcatcctaattatgtttttaaacttaaaaaggctctctatggtctgaaacaagctccaagatcatggtatgaaagattgagtaagttcctacttgatcaatcttttgtaagaggcaatgttgataaaaccttgttcatcataaggcacaaggatgagatcctattggttcaaatatatgttgatgatattatttttggttcaactaatcaaaagctttgtaaagaattttctgcagctatgcaaagtgagtttgagatgtctatgataggggaattaacattctttctaggacttcaagtcaaacaaatgaaggatggaactttcctcaatcaatcaaagtattgccttgaagtaattaagaagtttgaaatggagaaaagcaaagatgctacaactcctatggcaacttcaacataccttgattcagatgaaaaagggaagaaggtagatgaatccaaatatagaggaatgattgggtctttactatatttgatagctagtagaccagacattatgcttagtgtctgcttgtgtgcaagataccaagcaaatccaaaagagtcacatcttacaacagtcaagaggatcaccaaatacctcaaggcaacacccaaagttggactatggtatcctaaaggagtttcatgtggtgtgctccaccatgcgaccacatgatgttcatgaggattatgttaagatgaaggcattccctttctctctggatggtgttgctaaggattggttgtaccttcaatcagatcctatcaccacttggacagacatgaagagaagattcctggagaaattcttccctgcctctagaacaacatccatccgaaaggaaatttgtggcataaggcagttccctagagagtctttgtatgagtattgggaaagattcaacaagctgtgtgctacctgatatttgctttgtcgagacgcatcaaaaataattttactaagctaattctgtagcacatagctaacccaggtcgactcagagacacgatcaatatggttctagcttcaaatcattggtaataataaggggggattttgtcaaacagttggtatgcgtaaagtaaaacatgcaagaacacaaactaaaattaaagaacaatgcaaaaattaacaagattaccaaggagtaaagtaaaacagattagaaagcatcaatccaattcactaacccaagctaattgaatcatcatcattcccataaattgattctaacatgaacattcattcaatctcaatagaagcagttcaatcgattctactcctaaattaattgaaaccacaaccctaactgaaatatcattcaattaatcttgtgattatcatttaaaattaagacatgaatccacaatcctaattcactttcaatcctaaatgcatccataatcatgaaaacataatagaaattgaagaagaaggtgaatattcaagtagaattcgaaataccgaaccggaactccaattcttctcttgcttgagttagatccttggattgattaatgatttagccttccatgatgatcatcaaggaaaaccccatgaaatgagtgcagtaaaatagaaggatagcaagatgaaaatgaagaagatgaagaacaatgaagaacaaatgagaaaataaagaacaagagtttgatcctaaaaactaaaagaaagaaaagtaaaaactgtttttattgaatgtaaaagtgtgctatcagtttcactaaagtcactaatatatgtagtgactgagttctgaaaataaaatgggccacaaacaaacccaacaatctaattatttgctatttacaaccatgaaagtcagattcgcagcccaaaattacaagtgcagaggtgctaacttcaaagcttaaaatgaccctccaaatgacagaattggcctcaggctatttctagaaaacttgtagatattttcgttatatttccagggactcctagaatgctccattcagagatcggtagcaccctataggtcctgcacaagttagatatgtcaagtgagacaaaaatccgaaaatacgcaacaattagcaattacgtcaacttacttccctaagccaaaaactgaattagaataggaaaataaaggtccaagagaggtcaaataagctaagaaggatagaaaaatactcaactaaaagcactctatcactacctgtcctcaccatcaaatcagtgagcaattactgattcaatatttttatgaaggattgatgttgatggataggagtatgatagatgcagctagtggaggcgctctgatggacaagaccccccttgctgcaaggcagttgatttctaacatggcaggcaactatcaacaatttggtgctagagttacaacaactaaggtgatggctgcaaatgaagcttctgtctctatggttgttgatagccagagattggagaacaaattgactgagttgacatcccttgtgaggcagcttgctattgggcaacaacagaatgtgatggaaggcaatcaaccaaggttctatggtatctgttgtgcccctgatcatcccacggatgcatgccccactctccaagagacagaacagcctgctgaagtttctgccatgcaacctggccagtcatttagacctcaacagcagtataatccttactccaacacttataatcctggttggagagatcatccaaatttgaggtatggtcctggtccacaacaacagcagccctttagacctccacaacagcccttccagtctgccactactaaataccaacctcctcctttcagacaacagccacaattccaacaacctgcacctgcacctacacctgcacaacctgtgcaagccagctctggaccttctttgcaggatttaatgaagcaaatggccagcagcgatatccagtttcaaaaaaatttcagtgccaccatccaggacctgtaaactcaaattggacagttagctacaactgtcaaccaaatgcagcagcaaggttctggtaaccttccagcataactagttgttaatccaaagaatgtgagtgccattaccttgaggagtggcacggaacttccagatgctggtgctaaaattgatgctggtgctagtaaaaaagttgataatggtgccaaaatagattctgcaccaaaacagattcccttaccttttccttctagagtcatttcttgcagaggagcattttgtttttctccttgatatcattgatgttgcagtagatagtgtagatatttctgatttactttctgatttttctgatctttcttttgacttttttgattttgatcttagttcttgtaattgtacctgtgatgattctactgttgtgtgtagcatttgtgcggaaatttcctccgcactttcctcagattgtgttctaggtacaattacaagttctgagcctactatcccactttcctcagcttctagtcttcccttaccttccactattcagcccccttccttggagctgaagtcaccaaaattgatgtgcatgcaggaactgtttctatggagtttggtgatgacattgttcagttcaacattttcgaggctatgagacatcctgcagaggagcattctgtttttctccttgatatcattgatgctgcagtagatagtatagatatttctgatttactttctgatttttctgatctttcttctgacttttttgattttgatcttggttcttgtaattgtacctgtgatgattctgctgctgtgtgtagcatttgtgcagaaatttcctccgcactttcctcaggttgtgttccaggtacagatacaagttctgagcttactatcccactttcctcagcttctagtcttcccttacctcccactattcagcccccttccttggagccgaagtcaatacctgagcacctcaagtatgcatatttagatgatgctcagaagcttccagttatcatatctagtagtctgccactggagcataaagagaagttgatgcatgtcttgagaggctacaaaaaggccattggatggacacttgctgatcttcctggaattaatcctttcatctgcatgcatcggatacttttggaggatgattctagaccagtgaggcaaccccagaggcggctgaatcccactactcttgatgtggtgaagaaggaagtgacgaagctactagctgcaaggatcatctatcccatctttgatagcacttgggtttcacctgtccaagtggttcataagaagtcgggtctaacagttgtgaagaatcaagataatgagctgattccgactagagtggccaacagttggcgagtttgcattgattataggagactcaaccaggccactcacaaggaccatttccctctgcctttcattgatcaagttttagagaggttggcaggtaaatcacattattgctttcttgatggtttttctggttacatgcaaatccacattgcaccagaggatcaatataagactacattcacttgtccatttggcacatttgcttacacccggatgccttttggcctatgcaacgcgcctggtaccttccaaaggtgcatggtaagcatcttttctgatttattagagagttgcatggaagtgtttatggatgatttcactgtgtatagttcctcttttgatgcatgtttggatagtctctctagagtgcttgaccgatgtattagtactaaccttgttcttaactttgagaaatgccatttcatggtgcatgagggtatagtcctaggacatttggtctctagtagaggtattgaggtcgataaggccaaaattgaggttattacctctttgccttaccccgcttctgtgcgggatgtacattcttttcttggacatgctggtttttataggagattcattcaggatttcagtaagattccattgccattgtccaagcttttccaaaaggacgtagactttacatttgaccagccttgcaaataggcatttgagggattgaggaggaagctaacctctcccatcatgcagccaccaaattgggagcttccctttgagctgatgtgtgatgcctctaattatgcacttggggctgtgttgtcccaaagagttggtaaactatcccatgtcattgcttatgcttcacccactttgaatgtagcccaagttaactacaccaccattgagaaggagcttttggttattgtttttgctctagataaatttagatcctacttgctttgctcccatatcactgtctttactgaccatgcagctttgaaatacctgttgaagaagcctgatgctaaacctagattgatcagtggatgcttcttctttaggaatttgacattgagattaaggatagaagtggtgcagaaaacttggttgctgatcacttgagcaggattgagggacctcttgagtcttttcccattcgtgataattttcctgatgagcacttgatgcatttgcattcattgcatgtcacacattggtttgctgacattgttaatttccttgttgcatttgttgttccacctcatgcatctaggtcccaaatagctaaacttaagagtgatgctaaatattatgtttgggatgatccttatttgtggaggtttggtaatgaccaagtgatccgaaggtgtgtgtgcctgatcatgaaattcagtctattcttcagttttgtcatggcacacctaccggaggtcattttggtcctcagagtaccgctaggagggtattagactgtggattcttttggcccaccttgttcagagatactcatcactttaccaccacttgtgagcagtgttagagagaaggaggcacaattacacatagacatgagatgccttagcaacccattattttttgtgagatttttgatgtctggggtattgattttatgggtccatttcctgtttctcatggcttttcatatattttgcttgctgttgattatgtttctagatgggttgaggctaaggccaccagaactaatgattctaaagttgttgtggattttgtgagatccaacattttttgcaggtttggtgtgcctaaagccattatcagtgaccaggggagccatttctgtaatcggtcattcgcatccttccttcagaagtatggggttgtgcatagagttgccacaacttatcatccccaaactaatgggcaagcagaggtttttaacagagagatcaagcaagtgttacagaaggtggtgcaaccaaacaggaaagattggagcaagcttcttgaggatgctttatgggctcataggaccgcttaccgcacacctttggggatgtctccctatagggtggttttcagtaaggcatgccaccttccagtggagattgagcaccgtgcttattgggcggtgaagagttgcaacatggcatttgatgaaacgggtatgtaaaggaagcttcagttgcaagagcttgaggagattcgtttagaagcatatgagaactccaagatttacaaggagaaagtgaagaaattccatgactctaggattcttagaaaggagttccatagtggccaaaaagtgttattgtttaattctcgccttaagcttatttccagtaaacttcgatctagtggccaaaaagtgttattactaatgtttttccccatggtgtagttgagattaaaaatgaagctaccggcaaagtcttcaaggtcaatggtcaccaactcaaagcatttcatgagagccctcaagtggaggaagagcttgtggaggacatctctttggtcttgccaattttgtgtgaagatgtgtcatgaatgacatttggggagtttccttttcccttcttttatttgttgtctctttgttgcatttctttgcatgcttacattgaagacaatgtgcatttcaagtgggggggtgaaggatcctaaaatttttttgaaactttggttgttttctgttttctgtctgtttatattttgttgctgtctgtttttcattgtctgttggttctgttttctgtttgtctttctgtttcctatttgtctattttagttgttgagtctgtatgtttttgttgtctgtttctgttttgttgctgttttgttgttgtttttgtcgaatttaggcatcgtttcatgtttttcataggatttctaatttgcataaattgtgagaaatgttaaaaagttggttggattgagaggtttcatacttgatgtgaatcattgttgcaattgttgaagtaacaagtaggcttgagaaataaaatttaagatgaaccatgtgtggtagaattatgccttgtgagtttttgagcctttgtgaatatgttctttcattgtgatttcacccttgtgctagattactctatgttttgtcttgcctcttttgacattctttgttgcacatgctttgatcgagatgatttaggccttctttcttttagctactagccaaataagcctatccttgtgttgatatccattgtcaccctctttgagcctttatccttttctttcttgtttagctcattaaaaactaaaaaaaatgatggaaaaccatgttaccctagctttagggagaaaaggggctttggaattgttttgggagtgggtttcaaacaagtgtggggtgtttgtcttttgttttgttttgaaagaaaagaaaagaaaaagagaaaagaaagagttcaaataacaaaagttcaaagaaaatatgaaaaagaagaaaagtagaaaaaaattgtgtataagcaaagaaaaagaagttcaagcaaagaaaaaaaataatatatgcaataaaagttgttatagttcattttcatccttgtaaattcttttaaatttcaccttgcttctacccttcttttatcttgttggcttgctccccattgtccctcttttctcttaagctttagcctaaatatccttttcttatccacctttccctaagccattcattacaagctaataaagtccttttgatcttttgatgcatgtgtatttcaagttgaatgaatgagaggtttgtcaatgcttggatgtgctagttgcatgtggtgtttgagtgtaaatacaagccatacacatcatgtgaggttgagtgtcaccctttgagcgaattctatcaccttggtgcattcttgattctaaacttgactactttttcactttgtgctttgtgatcatgttttcatggattgtttgttacctcaacattattcttccatctttcatctctctcacttttgtgcattgttatgatccattgaaaaatatgtgtgccttgttcataccctttctttaaatttttggtttactttagtttgaatttttctcttagtctttcttttaattttgcccaggagtgcaaaagtttaagtgtgaggtattttgatagagtgcttttagttgagtatttttctatccttcttagtttatttgacctctcttagacctttattttcctattctaattcagtttttggcctaggcaagtaagtgggcttaattaattgctaattgttgcgtatttttggatttttgctcacttgacgtatctgacttgtgcaggacctatagggtgataccgatatccaaatggagctttctaggagtccctggaaagataacgagggtcattttaagctttgaagttagcacctctgcacttgtaattttggactgcgaatttgactttcatggttgtaaatagcaaataattagattgttgggtttgtttgtggcccattttattttcaaaactcagtcactacatatattagtgactttagtgaaacttggacagcactctttacatttcaataaacaagttttatttttcattcctttagtttttagaatcaaacccttgttcttcattttctctcaactgttcttgcttgttcttcattgttcttcattttcgattttctattcttccattctcatgcaataattccatggggctttcactgatgatgatcatgcaaggctaaatcctcagtcaatccaaggaaccaacccaagcacaaggagaatttgagttttggtttggtatttcgaattctatgtgaatgttcatcttcttcaattgctattcttttttcatgattatgaatgcgtttaggattgaaaacggattaggttatggattcatttcctaattttgaatattaatcactgattaattggatgatatttcagttagggctatggtttcaatcaatttaggggttaagtcgattgagctgcttctaatgagattgaatgaactttcataataggataaatttatgagaataatgatgatttgaattgcttggtgaggtgaattggattaatgctttaattctattttacatcacttcttttgaattctgatagtttctgtgttgctctttaattttagtttacgtttttgcaagttttaccgacgcacataaactgttcgataaaattcccccctcactgttattagtaaattgaagctagaaccatattgattgtatctttgagtcgatctaggttaatcctgtgctacagaattaacgtagttaaattgttttggtgcgtgtcgacaacataacatcatgcatcaataaatattgttggatattctgattctgattttgcaggatgcaagcttgataaaaaaagcacaagtgaaacttgtcatctccttggaagctcactcatttcagctgggagttgttatgcacaaagtctatggctcaagcaacaattgcaagattatggagttgaactaaaggagataccattgctttgtgataacacaagtgctataaatatttcaaagaatcttgtcatgcactcaaggaccaagcacattgagattagacatcatttcataagagatcatgtgcagaaaggtaacatcaaggtagaattcattgatacctataatcaacttgctgatatattcactaagcctttgccaaaagatagattttatacacttagaaacatgccaggcattcttgatgaaagtaacataaactagcctgtttgatgcatgattcttatgacaaataaaagcctcaatgccacatttatcattcaatgattgaaaattcgtatcaagttgtaaaaatactctgtttctgatacattgactggaataatcgattacactacgggttaatcgattaaaatcattaaaaatcactttcaatgtgaaaatttactcaagtaatcgattacgacaagttggtaattgattatttttcatatttcagaaattatgcttcactggaataattgattaccactctggataatcgattacattgatcaaaattcattttataactatgtgtctcactggaataatcgattactggaagcttgtaatcgattacacttaagtttaggattagtggtctctctggtgtaatcgattaccactcgggataatcaattacacaaagctctgatacttgaataattcccaaatctatgtatataatcaattacattagaatataatcaattacatgtcatcttctacctctatctgataggtctgtaatcgattaccataaagaataatcaattactatgtgtaaattttgtgtcctatttgtactggaataatcgattacttaacgaaataatcgattattcatgttgttgcacgtgttctgactgtttttttctgaaaaatgtaactgcccaatccaaattaaaagcaaacccaaggtcattaactatcaccaacagctagatttttcaaaattatggacgttggaagtctatttggtgtttataaataagtacaatgcttcatcaaaatcacttgcaaccttgtcttcctctccttctctaaatcctctctattttctgcattttttttttctgtgtctcaaactgctatcctaagccatgtcaaatcccactcctaagagagttagaacatccaaaaggaaggctagtgaatcctcttccaatccaccactacctcaaccaccaaacagacttgacatgtggttttccacagaatctgataaaatgaactatctacaattcaatgccactaaaccagtagcctcccccaaataccttgaactagattggtttattaggaaagggttccaattcccagctttctttgaagcccaagggctaagaagatttctagagatgaagggtaccttctaccctgatttagtgaaggtgttttacacctgtttgaaaggctctatgcaaggggacatgatgtccaaagtcaagggagtgacaatgaagattactccagatatttgagagtctgtggctggagtagtatgtgagggggctgggaggttcgatgaagaaccaaatggttacagcaagatggacacctatagggagatgattcatgacccacacatgagacttaggagtagattgggcactggacccatgactcctgaggatagacttttacactacattatcacttatgtagtcacaccaagggccacaaatcatgcccaagcaacagatgaaaaccttcaattggtctatgggctgaagaacaaatacccatgaactgggtactaatctttgaggagattatgctcaaatcaaagagattagttaactacccctttccctatcctgtggtggtcacaaggtttattgaccacttcaacatagatgttgaaaatgaagtggttgataatactaactcctccaacagcctcatcaaggagaagcacctcaccaagatgagcatgaggaaaactccagatggatggattatagctgcccatactgctgctgctgctgttgaaaggcagccttaacagcctcaacagcctgcttactctgagtttgagtccttgatgctggaaaagatgaacacaatgctaaaaatccaagaggatttcaaggctgaaactcatgatgctttagaggatattagggagagattagactcaatagaagcaaacatgaatgacaatgcctctgtagaattttaaatttatgttgtttgtttttagtttttagttttttatgtttttaaattcttcatgtgtattgggtttccatgtttaatctaatggttttcattcattatccgttgtgccttatctattttttgacttttaacaagccaaatagggggagaaatgcttgattaagggggagtattgcttgattaagtataccctggcttatactctgtttgcccctgttttctggttcattttgtgttaaaaaaattgaattgaatgaattctatatttagggggagttgtgattatcaaaggaagccagctaatacatatgatttgtaaatgaatgatatttggatcacaaatggttttaacacttgttcttggcaaaagaattgaaaattcttcaggtttgaaaagcttcaggttcttcaaattgattcaaataattaaactccaagccttactgcgaaatcaactgaagatttggcatgtttaaagccaaaaagggggagattgttgatttaagagaggaatcacttgaacaatgaacattggatcaagcttggttttgtgctttcaacatgctttgaagctttggtaatcaatttgtgattaatgtaaaaggaagaagtattttttgatgatccatgtgcatagcattcatatcattcatttagttaatcaaattaagttttaatatacacaagcatgtggtaaattaggcaagtttaaatctaagtttttggaaaaataagttcttactgatttaatcgattacactaagataagaatcgattattttgttattttttccttctggaaaacttttcaagaacaatgtaatcaattatgtatcagattaatcgattattttagctataatttcatataaactgatataatgaatactttaattgattaccaataattagtaatcgattacataggctaaataggaaatatcatctctctgtctttaatcgattaccacagatagtaatcgattacagtatatgcctatgattaacatgttatgctgcattaatcgattacaaagtacaaattgttttatgaagccttctgacttaatcgattaccaaaatccgtaatcgattacatagtgtatttcaaaaataggagcttgctgtcttaatcgattaccagacgggataatcgattattctgttcgttgctcaaacccagaacatctattgaacagtttaatcgattacagtcttgaaataatcgattacatatgcgaattaatcgattacaagagcgtatgtaatcgattactgacggttagaaagcttattataaatagaacccatgctcagctttttcactaacttgatcaattcgtatactaagcattctaaggctttcaaaacattcttgtagtgattttcctggttcattgagttcttgctttcacaaaatacttatgggtttttgaaggattagtgaagcaagattttctttttcaaagcttgaggaaagtgatgttctaaggttgaaatcattcttctacatggtgaaatcattcatatgcatattgttcattggatcatcaggtgacttctttccttaatctttgaagttgtaattctgttttgatttttgattttggtttgtctattgtaaatggatttcttgcttgtaatctagagatagagtttctctaggggaatagctgagtaatgttcttagtgggttgtctttaagaatctaatagtgttttagatttctaaactttatctaggtttgataaagagaggctttgtaataacttgtaagaactgaaatttacaatagtggaactccattctagtgttgagtggaagaaaactggatgtagcttcatagtgtttgaagtgaaccagtataaatctttatgtgttgttcttattctacctattagttatattttatctttcttgcttgtgaattcttgttattaaccaaattcttgaagtattacatattttggattaaactttggattgaataaaggttcttggtttcaaaaatgataaagatccaaaagggcaaaactctgattttgatcaagaaaatttttaaattaccaagcctaaccaattcacccccctcttggttaagtgtgaagtgttcccatattttacagctttccattctccaatcaaaacatgcagtcgtacaaccaaacaagaatcaaaacatgaaaagacgagcaaaattttacaaaaaataatagaagtaaaaattcaaacaacgaaaccacatccaccagtaattcacgaaagtaacttaaattgcacatacaagtgaactataaaaaaaatgaatcatgtaataggacatggttattttgaaagcaatagcagtgtctatacaactagtagaatccttcaaaaagatagcaagtcctccaacatacaaagcagggccataattggtcaaaacaacaacatattaagtgaccccacaagcaaaacaagaccccaatgttatgaaaatcatcaatttcctcaagggaacaacatggtcacgctccaacacgacaaccttgaagcagggaaaaaagtgattttttgcaacgtgaggttcaaaatttgtcgatgggttcgatgagtctagggtttatggtgaaaaattaggttggaaaaggggggttttgatttgtgggtgcaagagaagaagaaataggaagaagaagaagggaagtgaacacaacactgagagggacattcccttaatcggtaaaaataacataaaaggaactccacaacagcaacccccagagcctcgatgactgtgaaaggggtgaagttctcagaggcgatgagctcgatgtcacgacataggcggtgagtgagagcgaaggtgggttcgacaacgacagtaatgaacgggagtcactacaacatcacagagagcgagggtgagagagatgagagaagttagggttcacatagtggaaaggagttaacatatgaaagtaataaaaattaaaaattttccttggttagtgtcttaaaatctcatttttttggtattgtcttctaagacggttttcaaaaaaccgtcgtcaaatgacaatcattgtaagacggttttcacaaaaccgtcttagaatggtagtttctgagacattttgcgaaaattgtcttagaatgactgtatttatttacaaaagtgccacgatgtttaaaatgatgacggttttggcacaaccttcatagaccgcgtgtcgtaaaaggcttatttgctagtagtgcataaggaaaaagattgaataagacctacagaaaaaaaaattgaagaaatgaagattgataatcaagaaaaaaaaaagatttaagaagaagatggagaaataaaaataatgattaaataaatctacagttaaacctatgttggtataacaaagatactgtaaagggttggaaggaagaaaagttatggaaacacgtaacaccttcaatagagtattttttatttttattttttttatttctgcacttccaacaaaaataatcgacttatcactactaatgcaccttgtataaatttttatttttcaagtgtaaatgattttaatagtgtgatatctgaaagatttaaagggtagactatatttttagtctttaattttttagtatttctaatgttggtctctaaactttttgttgactgcttaaagttcttcaaattttttttctgtcctaaattttattcattttcatctatttggggtattaaatgatgatgacacggtgttaattttatattattttattattgacaaatattatttattagtgttgttagtagagaaatttgaatttaccgtttctttcttttccttcttccttcaccattaaatcaaccttatattttctcacaaaaatattaataacaattgttaatttgtaatattattttattgcatatgcgtcagtttgttttttgttggttaaaaacatgtaaaaattatttcaacaaaatgttgatgagatattaaatatttttaggctactaacaatttcaaaaaattgcttcaaaggaacacaatatatggatcaggataaagaatatccaaatccctacacgatcctataccatcaatgatttccagaacgaatatccgcttataaatatatggatcaggataaagaaaggtgtgcttcccggaccttgatcaattaattttttattcaatgactaaaaaccaaattttaaaaagtttcagaactaaaaactttattaacccaaaataaataaaaattaataataattgggtcacattgtcctaagtaccttcaaagttggctctgtcaaatgaatgatgtaacaaccaacagttatcaataattctaaaactcctgtcaaatgaatgatgtaccagcatcttatccccctttggataattgagttctctcacatgaatcatgttaacaacatcttatccttccttggctatttgcatatgagaatgtacactcgtttcactaatcataaaatgttaatgtttatttttttatattataaaaatactatcttttttatttttttgaaaattttgtataagtaattgtgaaatacttttttgtttatcattttctattttatttttgacataaaattttaacaaaaataaagaaaaattaaaattaaaatgtaaaactttttttctctcaaactagttgtgcttaccaaaatctagagctgacttacattaggatggacatggccaagatgagttccatgatctcgtacatcagattgggagtaccatttgttaggaggactaaagggggacctgcaaaataaaagacttcgacactcaagtaagtacgtgagttaggtgagaatgagtgatatgaaaaggtgagataaaacctgatatttatagagtgggttaggagttgtgggtccttgtttgtcagggctgttacagtggtgtaacaacccttgcagataattattagcttgtagataatagctagtaaataagtcgtgacttatttataattattagtagataattactagcttgtagataatatcaaatagataaagtgttgcttatttataattgctagtagataatgtgtatcttatatgcaattgagtacctgttacttgataaggaggttgcaacattatcattaatattcaaataatgaggtataagagataacatattcgacctaataaccctattgttaagggtgagctatctgtgctcctgtgccagggctgacatggagggttgacgtgtgtattggaatgccacgtatattttgtggaccctggatagtacataggcccccaagctctgagccagcttgcaggcaaaagatattgtctggtgtcgaggaagattgtctgatattaagggagattgtcagatgtcgagggtcgtagccttgaaaagtaggaaggtcacgagtttgccaagctttcaagcatggacaaatgttgtccaatgtcaatgttgataacctcacagatgcgagagttgtagatttgcaaagccccagcttgaacaagtgttgttcgggctgctgctgttaagttttctagggaggacatgttttttgttttgtaggcaaagttagacgtgttaggtgagtggagtgttcatatttgacaacttttcccttttctgatagttagagaacacattgaagacaagcatttcatttgtcttttcctacaggcgcgtgcagcatacacgcgatacttttgcatatgtgtcacttgtggagtgggcacatactagagacgcggttcgtgggtgagtggggctgtactatggtgtgaacttttgaggagttaatttaggccttactagttactgtagggttgcacctccatttaaatggagtggacgtttggtgttttgatcatcatcattttaaatttctgatctctctcctctgaaaacatccttgcctacgatttacaatttcccctttcgattgtcttcttcattcttaatgtattctttcttttgataatgtctttcatttctgatttttccttaggtatatgaggtagtgactctaggggttctattcagcaacccctggtagaccaataggtcatttcaatcggcggttccttagaggaagagactcgtcgtggagtctttgatagcgagtcttcttcttctaagaggatggcaaactagtgcaatgttggcagagttacttctcgcctttgtaggagggtgccacattctactgcctctctggctggggaacctgtgccagtcaccacaattcttccccttctatttctaggggagtgagaaggagtggtggcggggacattagggtttccccctatgtgtgacataaccacagtgttagatcggcttcatctcctcctgtcgttattggttatgaatgggtaagagacgatgtttttaaatatcactcctctattaccactgcagcgagcgtcattgctctggagcgtcaactgaggttggccaaccttgaggattcctggaagatggccgtccaggcttgcgggagtggtgatttcccctttctgagggcagcgccaggttgtccgcacttctttttcatgtactggttcctctttaaggtgcagggtttaattcttcccttgaattctttttaatgtgctctgtttgagcacttgaatgtagctttttcccaactccaccccaatagttgggctatagtgagggcctttgaggtcttgtgccccttcttcaacatccgacctagtgtgtcagtgtttttgtacttcttgcaaatgaagttaacaagcaagatagtgctgatttgagggggagctacataaagattacatgaagatcaagcattgtgaagtcttggatgaagttttggctttcaacatgcatgaagctttgaagatgaaagtttgtgattaaatgtaaaaagattgaaaacattctgatgatccaagctttgcatgcatacttttcatacacattttaagcattgcataatataagctttaagtaattaatttggaacttaagaaaaagctaaatgttttgaaagaaatagtctaaagccggattaatcgattactaccttaaaagaatcgattattttgttcatctagctttctggaaaatcatcatgaacactttaatcgattatctcatcggattaatcgattacttgaaaattagcatacttggaaattggctgagtgactggtttaatcgattacaacataatcgtaatcgattacatacttgttttaaaaatatagtcacactaacttaatcgattgccacttcttgaaatcgattatttagttcacctcatgttttgcatccatgttgtcttaatcgattaccaataattgtaatcgattatattacataaacatgatttttgacatggtctggtttaatcgattattgtggactgtaatcgattattttacttcaacatgtttttgctcaatctgctttaatcgattacgcgtcggattaatcgattatttgacccgttaactaaaatcaagaacttaccaaaaacgttttaattgattacaggagcctgtggagcgcttttaatcgattaattcagttacgaatttcagtataaatagaacccttgccttatgtgattaaatatagagagaattaagtacagatattatattttcgaattttgagcattgaaaaagctttctaaggattcacaaaggcattcttctgggttcatagggtctcgcttccattgattcatctatgggtcactaaggatctagtgaagcaaggcaatctttcacaaaggataaggaaaactgattctgcataactgttttctgcattcatcctgagattttcattattatgcatctcattcttggatcatcaggtgaattctttccttaatctttgtgggtgtaaagtttttctgttgtaactttgattttgttgattctattgtaagtgggttttcttgcaagaggagctagtgtttctccaaggacagctgaatagtgttctcagtgtgggtgtggcttctaagggtctaataggcttttagatctctgaaccttatctagggttgataaggagaagcttgtaattgcttgtaagcatattatttgcaatagtggaactctactctagtgttgagtagaagaaaactggatgtagcctcatagtgtttgaggtgaaccagtataaaccttgtgtgtttattcttattctaaatgtttgattagtttcttagtgaattctgttttacattttatttcttgaagcattacaagtcttgtattgatattggataaaggttcttggttgtatttgtgataaagatcctaaagggcaaaaactctgattttgataaattgattttgattactcaaaaagttttaaattaccaagactaaccaattcaccccccccccctcttgattaagtgtgaagtgttcccatattttacaattggcatcaagagctaggtcttgtaagatactcaagatcactgcatttttttaaaaaaaaatgaacacctcacaaataacctttaaggaaggagcatccttaaacagacctcctttgtttgagggggagcatttcagcttttggaaaaatagaatgaagatctttattcaatccaatgatccgggagcatggaaagctattgagaaaggtcctagagtacctattaaaatggtagataacaatatgattcccaaagattgggatgaaatgaatgatgatgaaaaaagaattgttcagtatgattttaaagcaaagaacatgataacctctgctctatcttctgatgaatttttcagaaccgttcgttgtacaagtgccaaggaaatgtgggagatgcttgaaatcacccatgaagggactgaagaagtaaggagattaagaaagcattctttgattcatgaatatgaaatgttcaagatgaatcaaaataagagtatttctcagcttcaaacaaggttcacacatattgttaatcacctcttgggacttggcaaaacctttgatgctaaagaacttaacatcaagattctaaaatgcctcaatagagcttggcaacccaaagtaacagccatcaaggaatccaaagatctttcgaaaataacaatggctgcactttttggtaagttgcttgaatatgagtttgaattgtctcaactaacttttggtgaagatgctgaaaggaaaagcaagggaatagcactgaaatctgcagcacccaaagtagagaaagatgaagactctagtgatgaggaggaaaatgaaagtgtaacaccccataggcctccagtgcgttatcattaataatatcagtttagcgcttaaattatcattttaaaacgtagcggaagcatagaatcgtttttcttgattcattatgtatggaataaacatatcacagagaatacccctaaaatcatacatttcacacccctgctgatccagtttatcatatcaaatacataagtaggcagataatcaaataatcaacaaatatactcaggaggaacatatctcatatcataatcagttctgtacatatatctatatacatcagagttcacaccacaccgtggtgatacaaaagaatgtcagccctcaccgagggtacacagaactgtacaatcacaggtgtacatacacaccatcccttatcaagggtacaaacataaccaaaacaaaatgagccttcaagctccctctgctgctatcagtcaataggaacgtctctattcgggcctcctgccctgagacggctctcttcttccggaagagtcacctgaaatcataaatccccacacggggtgagataacatatctcagtaagctcagggtccttggaaaatcattcccaccctggcccactatccacaatgcacactgttgcgcgctaacgcgcaattgatacggcaagtgcaccgatcgttaacaagtaataaaagtaggtaagtagagttatcgtctccacagggattggggtaattttcacaataatattaattctaaatgattggaattaaaaacagaaatataaagacaaagaaatagttgttgatgttggatgattgtagtttgaataaaaatagaaaataagtgcagtaaaaagataaagatgttaccaatggatgaaacaattgtggtcaggcgcaatcccctttgttcctacctccttcacttgattggtttattatcttaggtcacacacttgataaatctttcctaaattcgtaaatcctagactcttaagagcataaccagcgatttaaccctttaattcgatcgagaaacctaaacccttagtgaatctgtcaaactaagtattcaaagaatatatctcatgtgatcttgttaagattattcggaaaataagcctttcctaagttagttaatccctaatgtcttagtgaatcaaccctttaacctaattcaaaaacccaatgtcttggtgaattctattaagttaagcatgaaaaagaacatattataaagtccgtagccacgcatccctatgtctaggcgaagaacgactattattctaaacatgtcagaaattagaaccccaacgtgtccattgcgaatcctaaccctcaatacttaaatagaatggccaattccaaataagaataaaacattaaaaagcacagagtagaataaaataatcaaaacagcattagaatcaataccaattcaagttacagaggagttacatcagttcatggccttcccacaatacaagttcagcttgccataagcttcaagaaaccaaaggctgtcaaataatacactcttggtgaccttgccttgattcttgacttccaaaggtttagaagtgtgaagagagaaatagatgacacccaagggtggtgtgtattatgtgactctctagaggcctttatttatagatagatctaattagggtaacaaggcctatttacaaaaccaaatctgaatcaaatctttcttaattaaggaaactaaatatatttatagaatcacttaattaaggcaactaatcctaatataaaatcaaatccaatttcgaaacagatcttttttaataaaggaaagaaaatcgaatccacgcgacccgcgcgcgatctcacgcgagtcgcgtggatgggcagagaggatggcgcgtgtcgcgtgatgtatggcgctacccgcgcggcttggcagagggaaaattacttccagacttcttggcgcgactcgcgtgaattcccgcgcgatccgcgtgggactccagttttgcttttcttctttcgttggccttgaatcctcctcttttgacctaaaaatgcataattggtattgaattagctttaaaacaattaaaatgctaaacttaactaattctaacctatttaactactcatttaactaaattctaatctaaaactatattaaaaacaagatgtgtttgcaacacatcacacacacaaggcaatcacacaaccaaatggcccactagccctcatagtaacatatccatcatccaaacatggcggatctcatcaacacctaaatcacatggcagagaaccctcaatgcctagcggagaaccctcaacgcttaagtcacagggcagagaaccctcaatgcccaaataatagcataatcaatctcaagtacatgcatatcaatttaagtaatgcaacaaccaaatgcatgcatcatgaatcatgaccatcactcccccagagtgtggtgtgcaaccatgcgggaattcatccccagggacactaaacttacctggcaaggtctcgctctgtatgcctttccctgctctgtggctcccgccaccaacaatctcaaaattagggcctaatcaaggcatatacaatttcatatcaaaatcaagccaacaggcattccagcacaaaacatatcatatacagaattccccaatcctagggttcaatcaaactcatcccataccaggctgtacacagaccatacaaggtctatcaagctgaataccaagcatctgagtcatctcagactcaatgcaaacataagcatggcatagtgcctcatcagcctcattatacaaaatatcactggaatggtccaagccttgctcaaggcaccattccattagccacacaggctcataacaggcataatcaaggctctagaatggcctcaattccacaaatgatttatcacaaaggcctcacatacaggtcacagagccaaatttcaaagttatctaaatcagaaattgaaagctaatccttcatctattcatcgctctctacaaatttctctacaggaccctgggctaattctagccccagcttatatgggtcactattcatggaaacccccagaatcaaaatcaaacggagaaacttgagtctcttacctcagtgatgactcagaagacctcaggacagcctcctcgagctttagtgtccttctcaagccgtgggtcctcgccaagactcaagttctctgagtttctcctctgagattccacctctcactcaaaaggggtttttcaagagcagaaatgaaggattaagctttcccaaaggttcctctcacactcaaaggtcttagagaggtgtttaggccaagaaaaggggtctaaggaagcttggacaagtctctaatggaggttagggcgtggggaagaagaaaccatgatttttggggccaaaatctcgtaaaatggcctttgaatacaggttctgccgacgttcccgcgctaatcgcgccatatatggcgctattcgcgccaaattagcgcaaataaaagcttcctgggcacttgtggcgctaatcgcgccactacggcgctaaccgcgccaactgggcgcgtctgtggtgctaatcgcaccaaactggcgctatccgcaccatcaggccgcaagaaatggccttctggtgcaatttcacgctaccggcgccatatcccatgctactagcgctgcatcccacgctaactgcgtcgttcccacgctattagcatggactttttttttttaaaaaaaaaaaccaggttattatagaaagcatgaatttgattgtaaagaagttcagcaaatttatgaagaaaaacaagggcaaaaaatttgtaaggaacaataagaacaagttggcaaacaacagcactagcaacttcaagaaaatggacagcagctatacttgctttgaatgtggcaaactgggtcacattaaatcagaatgctccatatacttgaagaaacaacagcaagacagcaaagggaagaaggaagctaagcctagaagagcatacattgcataggaagacaatgaatcctcaacctctgaatcctcagctgaaatggaagaagccaacatgtgcctcacctcaatcatcaatgatgaaaatgatgatcttttggatgaagatgaggaggtaacttctaaacttgaacaagctcttttagcatttcaagaaatgcacaaagaggccaaaaagctagctaagtctaatagcaagcttaaaaagagtatggaggaacatcttgctaaaatagtggagctgcaaactaaagtttgtaacctgaagaaagaaaatgaaaatctgacttcaagttacaaatcaagtggatatatgtgcacctcttcctctacatctagtgacaagtatgaaatgctgcaaattttttttgatgaatatagaatcaatcaagaagaaaagtacttgcagctggtttcaaaaaatcaagaattgattgacatcttggaaaagctcaacaaaggaaaatgtgatttagatgcaatgttgagtgcccaaaaacagtttggagacacctctggtttgggttataaaaagaacttgaaaaaggtccaaaagactacatttgtactcccaaaacagaagcaaaagaaaaagccaagagtcaatcaaagaaggttttctagaaaaagatataatgttgtaacttgtcactattgtatgaaaaggggtcacacagcttaccattgttttgcaagaatgttttatgtcccaaatggtgaatgcatttgggtagaaaagaaaaagaaaacaactaacccaattggacccaaagaaaatgggtacctattcctttgaagtaatttgtttcttttgtaggtgtgtctaagagcaagctcttctctatggtatcttgatagtggatgctcaagacacatggcgggtgacatgtccttgctcaagaatctcacttttaaagatgggggctttgtcacatatggagataacaacaaaggaaaaatattgggtgaaggaagcattggtgacagcttaaataccaaaatcaacaatgtgctctatgttgaaggcttgaagcacaacttactaagcattagccagctatgtgacaaaggctataagatttccttcaatcaagattgctgtttaatttgtgatggtaaaagtgaagaggtaattcacataggcaagaggaaaggtaatgtgtatctactctctattgaccatgcattgttccacaaaaccacatgcttattgagtaaaatagatgaaacatggttgtggcataggagagctagtcatataaatatgcatcatatgaataagcttatcaagagggacttagttattggcttgctaaaactcaaatttgagaaggataaattgtgtgatgcatgttaaaagggaaaacaaacaaaaatatcttttcaaagcaaaaacattgtttccacctctagaccacttgagcttttacacatggatttcacttggactttgtttttgaaatccaagagtgatgctttccatttttttcaaaaattagccaaacttgttcaaaatgaaaaagggtgtaaaattgtttcaattagaagtgatcatagtggagaattccaaaatgaagattttaaaaattctgtgaggaaaatgggattaaccataatttttcagctccaagaacacctcaacaaaatggtgttgtggagaggaaaaacagatcacttgaagaaggtgctaggacacttctaaatgaaacaaatttacccaaatatttttgggctgatgctgttaacacagtttgctataccttaaatagacttctcataagacctattttgatgaaaaccccttatgagttgtataaaggaagaaaaccaaatgtttctcacttaagaacctttggctgtaaatgctttggtttaaataatggaaaggaatcacttggaaagtttgatgcaaaagctgatgaagctatctttcttggatattcattacaaagcaaggcatatagtgtcacaaccgcttctacttcaatttatttcttacttattttatttattattttgtttttctaaaaatattttttttattccattttcgaaaatagaggataatagcccaaaactgaatccttttaaattttaaaagaaaacagaaaagcataaaacttaaggcgttatctaacagtgctcgagtttaaataacacacagtccattattacagtccacaaaagttatcctcacacagttcaatataaacagtctaagatacatagcaaaatagagatcatcacaaagtagagaacatcacaaaatcttcatcacatcttcttgtatagcatccattgttaatatcactgttcctctgctcacccaaataaattgggatcatcacaggtgtcaaccacagacacaaaaatagggtaagtcatgataaccaaaatttaaataataatagatatgaatagtaataattgtaaaatggtatcacagattatttattcacagattagcttgtctcatttactcagcccacaaatacccacatactcattatggaatgtatagaacgcatgtttatctttttttatatgatgcatgactgagatatcagtttctcaacatctcatcattagtggccactgtcagatagcttaacacctcgcgagttggatcgatcctgtcgggataggtctgcgttgcaataggacttgcacccactctacatgtgatcatcacaggtaggtgatctccccacagccactatccccctagctcatcaccttagaaccaccgtatctcaactctagctatctgacaaacaacttcacagcttaacccccgcagggcaaacaacttcacggcttaacccccgtagggcatatgcatatgaaaatgcatgaatgatttttatcacatcttaattattcttcttctcatacatctcaaagctcaatatagtatctttacttctttctcatcataaaaccacttaaaatgcatgtggattcataagtaacatattaattttatagaattattcaacacgcaatctttgtgtatttcatcttctcaacacttaggtcatctcatcacatcaacacaatacaccactcaacttgatactcaaaattcatcaagattcaccatacatcactcaaagcttatcaagatttatgaatcatcaagcaatacacgaattctataagttttaatagaaacactcaacaacacatgataacaaactttatttcttaatttttcatagaatccaatatttctagtattaaattaaatatagatacttaaagaaatatagatgaattcctgtcatcatcacataaatcttattttcacttgtgacaaagagctagaaaattatgtctcttctattgtatttaacgaaattaatataattcatcatgattctatactaactttaacaacaaaataaatatttaagaaataggttagattaagagaacatgacaaaataaataacttaaagaacataagatatatgtttataacaaaataatttataaacatgataaatctaaaccataaagcatcatgtaaagagttgtaacttactttgaattttgtttattaaatttagttgagttatttatctcatcatcaatacaattaaaataaaagtctattaatcatccatgtctcacatcttgattctctattattatctccaaataatcaaacttcaatctttattatcacaagtattaactatccatatagttagtatttaaactttgtttatcaagaacctccccataccttgattattttctaaaaagtgaacaaatcttgcttccttgcctcccttgctttcacgtggacttgagtaaggttggtaagtatgattttctttttgtgaaagtgatagcaaaaggtggaataaggtgaaatacggatgctacttgttatgccttgaattggtttcaacaaagcttttgaaaaaagtcaagtggtgtggctttaggggaagtgcacggtcactttcttggctgacccaaaaatggtttagtccaattgcttttataggaaagtcaaaatatcttctttccttcatgcttccttctcattggttggttctttgactaacttgttccacacattttgttttcctccttctagtgtacgattggtgttggtgtagtgataaggaaggctcttttgtcttgcttgagaagctagcattaatgttagattctctttgtctcctaatatctcaagccatcattctttctttccactagtctaattctcattggctattaatttccttctttgaattggccccccacttcctatcttggctcaatttcacgtggactagcttactcagagtgcattccctttgatttttattcaaaaccacaagtaacttcgacttagtcataaaaatttctgcccaaaaccggtattacaaaaatattcattctgaattcgttaaccgttggatcttcttaaaattttaaagacatactcctaacccatatatctaacttttgaccgttgggatcgtagaaatagtgtttctatctgtccatgtatttggccaaaggagacaataaaatttgcttcaaatatctcttaagtcatttatgactacactactacaaaaagagtattttaagacgcgcattctaagtcggttgtatcaaaaccatctttgaatggaaggcgttgacaattttgtaaataaatagaaatttacaaagacgattatacaataactgtcttagaatgtttaaaataaaatcgtttatgtgcctaaaccgtctttgttattttgtattcaaagacgtttctgataacccgtcttcgaatttaaaggtcattttttttaaatccctaacttcacttttgcaatctcagacacaacgtcgcaccttgcttgacctagcctcctgcatgctccgtcagccgctgtggttggcttccctccgtcacccgtcgtggtctctgtcaatcggtggtggtggccgcttctccttctacaaggttctcctcacatgttcgtcagccgctcccacccacgctcccatctccctttctcttctcgatattccggccaaccaccatagatggtggcggagcaccacaactgctgctcgtgctccatcaccttcctaataaccataggcctcacaacgctattcctttggctgactgtgcgcattgtgttcactctacctctttattttttctttttagaaaaatctagcataaaatcgaaattagggccaaaaaaccctaggggttttgccactccgccaatctcttctccctttcccttataaacttcaaccttcgcaccacgtttaccctttctccctcccactttcacttgcaggcgagatgcatcattatttttgtgttttttattcccctgtttttgattccttaatgagagaaagtttgtgttttctctttctgtttttttaattgcatataaataatgctgagttggttttgtaacttcactgttctaaatgcatgctgagttggttttttctttctgtcactgtgtatactatttagtatttactctattttgaaagcaagatatgatcaactgtttcataaagctgctccaaacgaaccaaagatagtaatgactattatgttgaacaggcaggtctaatagcagctgatgaggagattgctgattggctaagtaaaaactactcagataaatatgtcattcttgcagttaacaagtgtgaatctccacacaaaagaattatgcaggcgtctggattttggtcccttgggtaagctacttctgagaggatgcactcccgagtgggtgggtaggttagatacctaaagtgtgggtaaacacaatggaaatggtcatggcacttaactagtttaaataatgttcacaatcttaagttttcatgacatgaatatctaggacaagaacttgatctatggtatgcttggttttggaaattcatggatatgatgttgagtgtgcctcaacaagcattaattgtttgtgtgccacttctaagttgcaattgagattgaaagtgttattgattttttggcattgtcatcatttcaacttaattgaccattaaggggaattgtatcaattacttatgttagtggttaacataactaaaagtagttaactttttcaataaatagctagttcaggtggtaagctgttattttaattttgacgtgatgtcactagtgttaaactaagtttggctagttcaacttaaatgggtaaattcaaaaaaatatgaatatcactttttaccccaattatgtttcagaatcacccttgttaatttcaatttgctttgtttttatcctatgtgcaacttcatatttactgttattagttcattggagtaattataagaagggaaagatcgatatgatcaggcataagaataagatatattcatgtgattaagatatcacaacaattacatattaataaagaaacttcatttctctttatgacttggaccttttataagtcataaaatcaaccttgtttgttctggtctacagaaaattgaggtttgtttcctatgaagattgcattctcttctgtatatatcattgacaatgggtaaatttaggtgctattttcaactttcatgtcgcaagcaagttggtttgactatagtttgcattcaccatccaataataagtcactagattcagtcagaattattctttgtcactgtacaatttcaatcaacttgtttttattctttcttttgagacccttgatttttcaatttataatttactttttctgctaaactataggactttaaaaaatgatttttctttttcttttggattttgtgatgcgcaggttgctcaggttctgttgactctgccttactcattttctcagctgggaatgctttcaggcatcatattacaagtgttctatggcttgcttgggagttatactgcttatttaattagcattttgtaaattaagtacaaaagccggaaagagaaagagaatgtcaccttcaaaaaccatgttatactctgctttccttcatttatatagttatatataacattaaatctatatattgtgttaaaaaaaatagattaatatggtcttgtttgctaggattgggcaactagcactactgggatttatactacaaagtctgcatatttgtgctatgttttaatgtactttttaaaaggaaggtatgtctcatgcaactgatattaattttgatttcataaaaatgtttgtgagtattagttgatcaggatttccagctatgtatttcactacttggttcttgcattttttagcattctttgacagggtctgcaagctatgaacaaaaagcattgacaggttcttttttggccaatcttgcaatttttagccttcatgcgaccagttattataaagataggaaggttcttttttggttaaaattgaaagggcgcacaccaaatgtttttggtatatatatagaaaaaaaacaattcaacgttttgggttgttttagcctcattaaaactgaatataattaaaaacataaaagacaaaaaatttattttaacataatatagttaccataaaaattgtatcagagattattttccattgattaaaagcattgacagtccagtaattataggtctgctattcccatgcaactctttacatttgggagaccaaaggaagagcatgtggggtctgaatattctattgggtgtttaatgtcctttctttttggttttgtgtgtacatgagaattgaactcagaacttaggcttctagccttctacccctaatccatacctctctcactctctgtcatgcaatgcttgtagacatatattgattaatgtttatgtagtattcaacaattatggggtctttagacattgataattctcattgcattgtttatattgcatatgagaaaatatctagcaaatgcttctgactagcttgtttccatcatcgcatatttggttttgctcttgtagactgtaataactatgataaaccatgcaattggagcatctagcgttatgagccaagaatgcaagaccattgttgcagagtatggacaaacaatgttggatttgcttttggcttaaatgagtaccatttgtaatttgttctacccacatattttggttgtttagtggtcatgagtaggtatgattgaaagatctgattttctaataattctcttatgttccaaagatatttttattccttgcattgtgtaaccatagtcaaacagccagtgatgggaattgtccaagatacacttttaggatgcagaaaaatcaccaagggagactctttaatggaaaaggtaataataattagtgaactcttccatttgtttgcaacttcagtatataatataataattatataaatatttctacttgaaattactagattatttggattatgtaatggtcaatctacctttacagcctcatccaaaggagagggattcttttctattgatccaaactccaactctctagtgttcttttttctttgtttacttcactaaatgtttacttgaatacataaagagatgatacaattggcttgcaaactactgccttttgcagaatgcttttagcattggaattggtgatacagttgctgatgcttccactatggtaactataaatcagactatctcagcagttaaggagaaagtgaaacaacttatcaaggatgcccaagagaagaagtttatgctaaacctgaccacacaatgattgattcatttgaaaaaagagtgatccaggtacataatttggattgcttttcaattgaacatggaagtttgcctcctaagattgatgcgaggaataagactgacgagccagagccagctttgccaggtatgagataaaaagtcttgtcatgtagttggaatccttaaggatggttttccatttcatcatatccagcttccagttggtaatatgttcttttattgaatatgagataaaaattgtcatctgatttcttgcttttgaaatttactttttttcttctccaacttccagttggtattgagactgaagtctgtacttgtaatttattttgaacagcccctaaagtattaagttttcccgaacactcgccacagagtcagccaactgattgtacaaaaggtggagaaccagtttctgcacctccatacaaaacaccaaaaccactaccagtcataatgaatggagatgacaattttgaactcaaaaccattttgtcataaaggctctaatatcatgtgaaaaaccaactctcataaaagtttcaagttttttggcaaaggcacaggagttacttttcaaatctaacaaatacatagttgacatcatgcttgaattcttctggaaaagtaattttagcattcttaaaatgatattatgcacaccattcttgtttatcatgttcaattatttactatacaaagcctaaagttttggccgatggaagacaccgatttctagatagcaaggtacataatttacttttcatatttttggtcaattaaatccactaaacagcaaatggaggaagtaatcacatacatcaatgcagcaggcagcaggtagctgacaccccccactctccaacttataaatagccttacttagcattccttgaagttatatactttgtttttgaattgtagatcagattgagattatggcagtgcaacctgaatttgagcatcccaggagagcctatggatgggcagctagggatacatctggtgttctctctccttttttgttctctagaaggttggttattcattctccttttcaatctatatatatcccttacttaatatagggtaatttctttttataattgacaatgtttgaacttaatctatatataatttatcactaagttgttctagctctattaatggacggttgtaaatctcctcatatataaagtttaattcctataaataaaaaaatttaggtatattctctatggggggttttggttgacagcaccatgcagtgacacattgtacagtacagtacaatgtaattgagcaatggaagaaagggtccattactggtaggtaggtcttgatgaattagtgagataaattagtgagataaattaatttgattttgattaaataaattcatagattaattaaatgaaataactaaacaataaacttaattgtgagtttaaatttttttattggtataaattaatatgataccaatacttatatatcttgttgaatcaattatgttaaattcacttgctaaaagtatttatttattataatatacatttaaaatttgcaagtatttattattattattattattattattattattataaattctaactcatttaaattatatataaatatgtaaattttaaagtacctactttagctcattaaaaaaatcttaccattttcattctctcattataaaaattcacacaaaatactaaatataaaaatttaaatataaccttatcatgtatgtaagaagattcatttgctacttctttaaataaaataacattaattagctatgaagtttcaaattcaaattaattttacgtaaacaacaaattaatgtttaactggagtaagaaacatcaaattaaaagttttaaaatatatcattaagtggattttattttagaatatgtgaataaaataatattattttttatcttaatcattctgtttattaggttttcataatttatacgagattataaatttaaatatattgctgctaataaaaactaaaaaaatattacaagttgaaaaggattcccataataattaaaatggtcttatttacttgtttcctaagaatattcattaaattattttacttatttaaattataaaattatatatgtttatatttatatgtatgtgtgtttaagagagtatacgttttcattatatttaattggagtaaaatattgtttactcccctctcttttttggtgaatttgttttatcccctctaaaacttaattaagaacttatttgtcaatttaaattaaggattgattttgatgagataatttttcaattctcattttaagataaaaggaaactttaactcggatcaataactttgtgggtaatttgtttaacaaaattttatacttattttctcaaatctaatttaaagagtagaatatttacttaacaaagtttgtgaactttctctttcttaaaagagttttaacagtagatagcttcttaaattacattttaaattttaccatcatatttgcgtaaaattttttataaaattattttcaaatttccaacttctatttcttttttttttagaataatgtaattttaagtttcctaatgtaccaagtgttacggtagaatagagaaatctcctttcttaattaatttctttttcataggattaaatatgggaagttttgttatgcatagtaatccaacttagcttgtaagattgtctctaatgaaaaataatttttagaggataatggagaatatacttatgatcttttaaaaaaagggttaaaacaaatatttaagaattactaattatttaaacaattagttatatggtgactgtattttttagtagagttatatatattaacatagatttaaatgaaaagaagtgtttacagtcatgttcttacattcatgaaaattattttcatgtttcatgtcatattttaatttaaatggatgataatttttagaataagtatttattcccactacattaatctattatattccttttttacttatatttttaattttttttacaattactaattaccaaccagatatgtctatatgaataacattcctagataatatttctgaaaatacaaaattatattgtgaaacaaacgttgtttcatccgaagaaaagtaggaggacattaaaagataataccgatcatacaattcctggtgagacatattatacagaatagttgaactatgaattaaaaatagataaagcaaatgttgtttaattccttctattattccatggcaagacctagattgctttaactagtgtcaaatctcttttgggatgaagtcctctagcctgctgctagctgttgctattcccagccagaaaatcgaggttgtataatataagcaccattgcaattgaagagaagaaagttagcacaggtccaaagatccaaagtaaaatgggaagtgctgaatagaaaagtctgtttcccaccgtattcaataagatggccttccccaaaagttgagttaaatattctgaggtcaccaaggacttgacatcttgtggagtgcaaataaggatattcacttgattgggaaacccgatagagaaagtgtgacacagaaatgagaatgagaatatggctaggaggatggcatacttcagtccaaccataaagtccccgtgtgctccaaaaattgtgtcgttgattacatttttaacactgtaagtgctgcttatgactgctcctaggcccgcacatatgagaatggctgttgtggccataagggttgaccccatgattaggtttcgaagagattgaactgctacgatataaagtttgcccttgatgttgctcgagccatggattggttacatgccaacgggatcaaacatagagatctgaaacccggtcggtaccttttatgtgtatatagtgcattagtaatattttctatcagcttaatgtttgttgtatataactcattttccgtaatggctaagttttattttaatgtttgttgttttattatagattccatggatttggggtccttcaattataatgctctgctatatgttgatctttaaatcatcactcattaggttgtagaggcctgaactaatgcaatgcactagaaactggcaatgacatacacaagcagcatttggatttagatgtgttggggttttccagaaagatagactgagcaatttatcagtctttatgtgaaagaatccatgtaattcttcctgaattatattaacactacattgccctactttttaatctcatctcttgcttctttttttaaaatttcagtttatagaatatttctttagtaagcctataataacctgttttgctgtgaacaacaatctcgatttgtagatcccctcaacataacagcaatggcatgccctactttcaacataacaacaatggcatgccctactttcccatgatgtactcctctggcaattactgaagttgaatgtgggatacctaactcatgtaactgttagtttggtaaaaattttgccaaaatatcgatattactgtgagttcattcctaaacacttttaggtacctgaatattcttactcccttgatgaagagggtatttgcaaatataacaaaacagagaaagttaatgaaacacttaatcttggtcttaaacaagctgtgagttagccagttatagtttgatacgtgcttgtgtgtagttttatttgtttacctttgcaacatttaatcttatatgtctttggcaatacagaaagttcttggactcttttctggaggccttaatgctgcatctacactttcagttattatggatgaagttatatatggagctaatttgacaatcaaaggttccatgtcctctggtgatcttacatctttcattcgttgtctcaggtaagttcgtcgctctactcttcccttttacattacaatgaatcatgtaaaacattcactatagtttaaagtgtgtcatacatggaaatcggttattagttggttaagatggtacttgttttactatcctatttctgccaaagtataactggtaccaagtcatcaatattattttgttccttgttttatagctgtcaattatagtaacattcatactagacatgtcattagaagctctaatattttctagtttatatatgatacatgtatgaagtttcctctttggaattaggatttgaatggttattcttagcagttcaagttattatggacaaaatttcaaaaaaggtcgaacggttatgcatttgttgaatacactacagaggaggctgcaagtgcagcactcaaagacatgaatggcaaggtacatttgtctttttttttggttgaaaaatggagatttgcttagaatcagttctgcttcatgactgtcattgacagtgaaacagaacatgggttgaaataattcagaaatgatgatggtcttgccccaccaacaacactatcctctgaatttatgcttcttcgttgtctgtccacaagattaaactactattgatctattctctgcaaaagttacaaatctatacataaccattattctctgcaaaagtacaatattgttgcttcatccatcatgtaactgcattatgctcagccaaattattagtgtgacttttcactctctgagtatattaaacaattattcggacagtgtattctaattaaactctaatctgtttcttttgttttgcaaagggtatatggcaccacaatatgcattatatggggttgctgtaaaattttgcaaattattaaatgttatatcaaatatcaagcaattgttattttttattaatgtattagctttcgcatttaatgattctttttacagtgtatttaacattaaacgaagttgcgaatgatagatggttatgaatagtaaaatcataaaaaaaatgtttccataaaaaaaattaaaaaaattagcaatctaagacggttcctgtctcagccgtcttggtatggtccacttcggttccctcaacacccacccgtcgtagaaactccaaaaataaaataacaaaaaaaaggattcaaagacggtctcttctcctgatcgtctccgtatgtaacctttctaagacggttccttcggcacccgtcttagaaactccaaaaaaaattaaaaaaaaaaacaaaaaacggattcaaagatggtctcttctcttgaccgtcttcgtatgttcccctttctaagacggttctctcagcacccgtcttagaaactccaaaaaaaaaaattaaaaaaaaacaaaaaaaaggattcaaagacggtctaagaactgtcttagaaagtctccactttcaaagacgtgcgtatcaaggacaggtgcagaaccgtctttgaaagcctcctggaaccgtctttgaatcccctttatgtagtagtgctagctttccacttggctaatgtttattggcttaaggaataatatcttttcctagtagcttgttgcacacatttcttccttctccttgttagatttcagcttgtggactactccttttgggcttcacaaaccataaaaactaaggaatttagtgaagattccttttgtcccaaaaatatctccttgcttgatttctattggccaaagctttgaatttttctactccttgtctccttgacttagtctatccgtcctattttcttaatgaaggcttccatattgcttttcttccttgatcacacggccaaggcttatttgtatagcaaactttacaaaattttcctttttactacatgtaatggtaccaagctatttccttattggtccgtttcacttttaatttgtaaaattactaatccatcttactaaattagtctatttatcccataattaagagaaaactccatagattatatttacacttttcttataattttctgatacctgaggttgtctagattgagctcttttcaagatattttccaaaattcctaaaaatcacagtttatgattctctgtcaccaaccatgttgataatttgttgtctaagagtattttatcccatcctcaggttcccacaaatttttaaggtcatctagtccttgtttgacctaaagggtattttggtaattttacccctcaccctaggggtaaaatcgtcatttccaaaaatgtttagggaaactctgtaattgtcaccctaagggtattctgctcattttttaaacatctcagagtatttataaaatttttttccttaaaatatcttactcaaatgtctagggcaatttggtcattttccaaaatgtccaggggcatttctgtcattttttcctgtactgcctctcattaacattttatccccataatttactgcgtttccaaaatttggggcgttacatatagagtttttaataaaagaaccatgtgtatagatctgtccatataatttgtgatgaatctaacccctcaaaagaggaaaaagcttgtgatgatgatgcaggaaatgtaaagcagaatatttaacttgaaaagatgtctatcaatgagaaaaatgaaccaagtgctaaagaaggttcatcaacaccaaaacaattgccaaaggagtggagaaccataagagatctttcactagataacatcatcggtgaagtatcaaagggagtctctactagatcctcacttagaaatttatgttgtgacatgacttttgtttctcaaattgaaccaaaagatatcaatcatgctttgcaagatgaacattggatgcatgtcatgcatgaagagttaaatcaatttaaaagaaatgaagtttgggaacttgttcctaaagccccatccattaagcctattggtactaaatgagtttttagaaacaagctggatgaaagtgaaattatagtcagaaataaagctagattggttgcaaaaggttagaaccaagaggaaggtattgactatgaggaaacttatgctcctgtcgcaaggttagaagatattaggttgctacttgcttatgtttgcattatgggttttaaactttttcaaatggatgtgaaaaatgcatttttaaatggctataaggaggatatatatgttgaacaacctccaggattttatgatttccagcatccaaatcatgttttcaaacttaagaaaaccctatatggtcttaaacaagcacctagatcatggtatgaaaggttgagtaagtttttacttgatcaatcttttataagggacaatgttgacaaaaccttgttcatcaaaagacaaaagaatgatattttactggttcaaatctatgttgatgatattatctttggttcaactaatccaaaacttcgcaaagaattttctgcagttatgcaacaagagtttgagatgtctatgatgggagagctgacattcttcctaggattacaagtcaagcaattggagaatggaactttccttaatcaatcaaagtattgccttgaagtaatcaagaagtttgaaatggataagagcaaagatgctacaacacctatgacaacttcaatctatcttgattcaggtgaaagaggaaagaaagtatatgaatccaagtatagagggatgattggctcattactctacctaacagctagtagaccggatatcatgctaagtgtttgcttgtgtgcaagatatcaagcaaacccaaaagagtctcatcttactgctgtaaagaggatcatcaaatatctcaaggcaacatccaaagttggactttggtatcctagagatgcatttatcaatattattggttattcagattctgattttgcagggtgcaagtttgatagaaaaagcactagtggaacttgtcatcttcttggaagctcacttatttcttagcattgcaagaaacaagcttgtgtagctttatccactgcagaggctgagtatatttcagctagtagctgctgtgctcagagtatatggctcaagcaacaactacaagaccatggagttgagttaaaggatatcccattactgtgtgacaacacaagtgctattaacatttcaaagaatccgatgatgcagtcaaggaccaagcatattgagattagacatcactttataagagatcatgtgcagaaaggtaacataaaggtagaatttattgatacacatcatcaacttgctgacatatttacaaaacctctgcctaaggatagattttacactcttagaaacatgctaggaatccttgatgaacataacatatgctagcttgtttgctatatgattcatatgctatgtgaaatgcctctgaccattttcattgctgaaattttatggaaagttgtatcattattagaatgccatgtacctatgaataaaaagctgtatcagaagttaaaagatttgtttttctgctactcgtgctgaaataatcgattaaggctcggaataatcgattatcttcattaaaagtggaaatcagtatgcaaatcaaactgatgtaatcgattacatctatgtcataatcgattacgcttcatatatgaaaaactatgttcttctgtaatagtcgattacctattgggttaatcgattacaggattcaaaattaaattttgaaaatttgagggtcgctgtaataatcaattaccattcgggttaaccgattaaaatgttcatatctatgtttgaattaccattcttaagcaaataatcgattacataagcaatataatcgattaatgttcatcttcaacctctggaaatcattattgtaatcgattacatcacgaattaatcgattacactatataaactttgttatacttactcttgaataatcaattacataaggatataatcgattatttaaactgttatacattttctgacaggtttttgggatttcgtaactgccctatcacttggattttgtgacttaaacctctattaacttacattacctgcttacaaaaactatatttttcaaattccaatcattttgtgcttaatctatgcctataaataacaacttagtgaataattttttctttgcaccaaaatcaatctctcttgcattctcttctgtgtctgagtctgtcactctcattcctccctctgttcttgctctgataccatcatttgtgctctgataacatactcctctctgtttcattcaaaatgtctgcaccaaaaagagttagaacaaggaagagaaaggtaggcgagtcatcctcaaacccccaacctcaacctccacctgatagacttagtttatggttcactaaagaggcatatataatgaattatctacaattcaatgctactaaaccaatttgttcacccaagtacattagtttagattggtttatcaaagaaggttttgtgtttccagccctattagagacccaaggtcttaggcgttttatggagatgaagggtacctattaccctgatctagttagagtctactgcttggcgtctcccattcaaacagtttctacacagacataaatattttccatcctcatcaggtcgactttttcggaagcaaattccaagaaatgttcaacaccttcctgaaactcagcactcatgcaacttgcattcatccaacttcgatcatataattggtaactatgtgatactcaaaattattccatgccgaaaacctcacttttttcattcaaggtgtggccttatcccattcaggaagaatcattttttatagtacattcatatgtaaaggttaagtctcttttgttaatttgacgaaattttgacagcatttcgccttgatctccaagtacacgacatgaaagtggtgaaattaattcgaccacaatcaagtgcacccagagaacaagtgaaatgcatagtaccaaaatttcatcaaatttaagaaaagaaactcaacctatacatatgaatatactataaaaaaatgactcttcccaaactgtccaaatggacaattcaagaatcaatacaacaattaatccaaactgtctggaagaatcatttgtattgaatctcaaacgggaaactaaggttcactcatattgaacataagttctatataaagaaatagtcattaatcacaaaaacaaattctcgaggcaagtcgttagacattcgtacctatgatgatctctgtgatatctccaacaacgaaagtcgtgatgcagatgcaaccaggaaaaggaaaagttcctgcaacttacattcaacattgaacattaataacaggaaaaggaaaatcatttgatgaactaacctagtgaacaaaaatctaaatccatttataaacaattatcttaatattttggtaaaaaataaaattgtacctgtgatgatctctgtgaaatctccaacaatgaaagtcgtgatacagatgcaaacaagaaaagaaaaagtgtctgcaagttacattcaaatgaaaattaaggattcacatattgcatattaattcaaatgaaaattaagggctccccaagctggctgtggaacgcagtgcaagggtggtgttggaagcttagggataagaaataaaaacacatctatctttggtgtgtagcaatttggaggattgtttttgttggagcaataatttgagatataggatcgtatagtatagtagtactactggagcaagattggaatgaatgatggtgtggctactagctataacacccattcattcattccaaagcaaacaatttaataacatatacaagacctttaaagaaacgccaagctcgtagcttacaatcttttcatgaaagggagagactcctatgaagttcaaggcctcatgcacatgcatccctctctcccttccatgaaattttaaccacttctcaaagtggagaaggtggggtatagtccctatgatttttcgaaataaagctactcatatactgccacaaacttgtacttgcatatatgtatgtggcctatcggtaatcaagagttgtaacattaattaaactataactagagggtagttagctgctttatttatcaacaacacttcattgtcaactcattaaaggggctaggcttgttatttgttaatacatactttaagttaattatatttgtcttggcgggtgcaaacataatgtgtctcggtcttacatctcctgcgagtgttttggatgaggatgtaggggcacacaacaaagtcacccctcagcacaatacccttatctgctgttggccaacaccaacaagcatcccatgtgatgacttgaggaagttttctaactggctcacttatccgcaacttttttgcaaaggagaacttcttggtgggtgtgacaataattgctactcatagagagttgcagggagtggcaacaggttttcaaagatcatggatttgataccattcattatgcaaaattaacacaataaggaaatgtcgacaaccttgttggatatttgttgaacccccaaagcataaaaaaatttataaagttttgatgataacaaacaatgaatgccacattattaaatttattacactaatgatgattatttgattacttaatattttgaagtttctgatattttggatttatgaaaatcaacataattgagaagattatttgaagaattttgaagattgatatcattcaagatgacatggaactaagaagatttgtttctatttatttttattaaattttatgtaaggagattagaagattgatcttgctaagatatttgccttaagattgcatagcataataagataaaatatttaagattgcattcaaaaataggataaaatatttttaagattgcattgcataataagataaaatgttttttaagattacattcaaaaataggatagaatatttttaagattgcattgtataatataatagaatatctttaagattgtattgtataatatgatagaatatttttaggattgcattcaaaaattggttaaaatcatgcttaaattagtataaatagaaacatatttttgtgtttagagtatgcattccattccaaacaatattagagctttagagagtttatgtttgcatcattgagagaattgttgtgagatcatatagaagcgtttggcaagtttgattcttcaactctcgatcaggatttaaaggtacctattttcttaaggaatagaagcgtaaaggtaactattttattgtattcttcttcttgactttggaagaggtcgcaactgggaaactaggataccatttttgtttctgttcttggtgaattgagacgtacgacttctggctgggaaacaaggatgccagttaggataattgttgtgtaagggtagactaggaaacaagatattaggaactcttgtacgcaaaattatcatagtggagctatccattggattgattatccaatttggacgttgtgattttttacccaattgagtttttatcgttaaaattgattatgtcttctttatctcttatctccgtattattgctttgagtttgatttttaaattgtgaattattttataaatctcaattcaccccctccccctcttggtgggggtagcactcaaaccttatgttatttttcatgctctacacttaattttgaaagctataggtagaatgttatagctctgaagaaatgttattctctggttggtagaatgtgaaatataaataattcaatcattgaaaatcatgtctaatgatttttcaaagaagctagtctaccaaaataactagaatttcgttggtccaaattctttatatcaagaatacaacacactttctttcaaaaactaaccatggaagtttaggaaagaagttattttactacccattgaatcaagtagttcgagttctttgttatccttgcctcaacaaaatttcttcattttcttccttcttctaaatccttgagcaactcactaatgccaagagacattgtttatttgtgtgattctaggaaaagaaattatctattcttatataagcgttgtacataatttgaaatttgcttaaccaatatttttttttatttttattatctttaaccagtctaatatattattatactaacatcttttcaaaatatataaaaatataatatattaaaataatctaatctatattttcatttactaaaagttatatttagataatctttatctaaataattagtggattatttttgggatattacagtcactgcaaccaccaccattatcgtcattgtcgtcaccaacatcatcgttattgtcgtttgtaaccaccactactattgtcatcaccattatcgtcatcgcaactattgtaaccactgacactatcatcgtcatcgttgtcactacactaaaatcattgtatgcttcatatcatggtgcgcaccaaacattgaaacaaatacgtttttttcttaaaaaactgtctttgtatgctgacatatgaagacggttattctgtaaaaaccgttttcgtatgtgattcataaaaaaaacgaaaaaaattttgaaattgaaacaaagacgattttttaagaaaaaccgtctttgtatgcttatatatgaagacggttgttcctaaaaaaccgtcttcgtaagtgttttgaaaaaaaaataaaaaaaatttaaattgaaacaaaaatgattttttaagaaaaatcgtctttgtatgctgacttacaaagacgattatcccttaaaaaccgtcttcgtaagtgttttgaaaaaacaattaaattgaaacaaagacggtttttaagggaaaaccatttttgtttcaaaacatacgaagatgattattccttaagaaccgtctttgtaggtgttaaaaaaaagatgcaaagacgattttttagaaccgtcgtcgaaaatgatacgcataacaacgacagctcaacaaccattgtcatataggataaataaccgatgtcgtagacctcgcctatagtagtagttattattttcctatcatgttcttatcttatttgtatatatattttatcttatcccatcctaatcaccaaacataccctaaaggtagagaagataaacagcaaatgaatgtcaaatcttaatgattaaatttcagaagggggtgagtaacatccacaccagtaaaccctatgtagataccaagagagaatgattctaactactccactgaaagaatctttgcccggtcaacgacaccttcacgaaattgcatcatccataaagcaacctaactggtgcgaattggattgctacaatgtcacgcatatacatcatacgatagccacatgctcagtatacgcatgcttttcaaagtaatatacatgatcagttacgcaaaatctattgacacaaaacattcgagcttctgacgtaataccttcgatcaaaatctatttaactttttgagattatcgatcgtattcaaagaaccaattagaattggtctctcaaattaatgtggagtacccgtatcatgttaataatgtcctaacacattggctctgaaaactacctttcaaaagtcatggaaaatttgatatctctggaaaatttagatacttattttgcgagtaaatatgtgtgcagtttataaagaatgatacttccaccattctaaaataattgttattctaaggtattttaaacagataaaaaagtaataaatagataaaaataataatagttttacaaaactgactttatatcatttttaaatcatttataattttttattattcatcattaatattatatagatataaatgagaaaaataatcaatgttacattaaaaatttataataataattattttggaataattttttatacaacaattataataaaatagaaagaatatataattttatcttcttttctatcatgaaaaattaaagtctagatatatttttaggtgactaaaatttcacaaaaacatataacttctatcatgaccaaaccgaattacaatagacagataggacaagacatttgtgaggatgaggaagaatttttttcacgaggccaagaaaggatttgactgaaaaaatattattgagaagggtcatatctatatatttaactcaattgatttacgaatatgtataaattattgtaaattattggtacctgagtttgatttttctagataaaaacaataagaacctcaacaagtgtgaagtgttgtcacaataagaaacgtaggatattcctagtgtgcgtgaatgatgatagaaaagagtatcataagtttttttttttttttttaaaaatgttttatttaatataaatataattttttattataaatttatgaacctctaaattaaaaaattataaatttatgaaagtttttatggtatgtgacactgttaacttttacaaattaagctttattaaaacaagatatttagtttttatatgtaaatatgttttatagtatagttgtctctcctgtcatttaatcttaggtctatgcctgctggttgtcaaaaacaactttaaaaagagtctttcttactatgaaaaatgtaaataaaatataagttacacgatagaacatatgtactaacaaattattgtttattggtgaaaaagaaattattgtttaataacttatgttaagagaggggtaaatcattgtgttgcttgaattaatgtgtaaactagtaataatttagtttgtgaaaaatttgattttagctcctaaatgaataaaatgtgtgataattacgttttgttgttaagttttatgagatcattttgttattaagttgtaatgttcaataactacgtgtcattttttgattttagtccctaaaaaattttcacttgtttttcgttctcacaaaattataatatgttatttttatgctcgaagttaggtacaaatatgtctgaacctacgtgtttgatgactatgcacataatggcccaatagccaactgaacgttgacacgtgctaaaacccaaagcatatctctctctaattcgtgacgccgatgttcaacccgaacccttcccctccttcccttgtctgcacctacgacaactgcaagtgtcccaaaatgacgatgtttgagcagccttgtgggagtccttatcccatgagagcaaccactattgcagcttcgagaagcatgtgggaggccgaattgggtggtgagttcccaaacagggttgagctacatgccgccaacacctacgatccaaccgccaccgagctccaccacaaaaattctccatgttgatcctttcgtcaacgcgattcaaggcttctaggatcaccaggtcctctatgaagtgatcaggatatctcaaggggttagccctagtggcgaatccatttcatactatatttaaatcatgattttagtttatatattttatatataaataaggcatgtcaattattatgttattagttttatagcgtaataatgtccttagaatatgtgattcgtttgatggcaaatcaagtgggacttgattgtgagattcattgaataatgaagtgctaatgtaaaaacatttgtagtgaagtataattgttgacaagagtaacaataatgcattgaggctattgtgtgagtagactaataaccacgtctcacatgtcatggatatgagatatcaagtcggtacacaggtataaacattaggaataatatttatactagataaacccactatgagaaggctctataatagttatctaagtttcagaagcccttctcaaggcaaccataaggtgatagttgtccttcaacttgaagtcattatgattcctacatgtaggaattgtaggatctaatgctatcaaatgtcatccataacaggacgatcataaaggtagtatttcggcctgcaatgaatcatgttgagggtgatgtagataggatttatccctcctacatagcagaagttatgtctatgggcctcccgatagagtgggacacactatatgcatggccactcggaaatgggtcaatatgagatattggacccatttgtgtttacacgtccacttggctattgagaaatcaatgattagacttaacgaggatgacactcttatgcctcgtgctcgatcaagacatttggacgaagggacaaaggctacatggtggaaatgattgtggtaaggttgaaatcgaatccccgatgtttctcatgggctaggtggcagtgatgtattgttagatgtcaatcattgcctataatattattgtcaatctagagggagcctatagggtcacacacccagagtaattaattggagtagatgaataaattaaatgtgacttaatttagttcatagttaattaataaaataagatttaattaaataagacgcaatctgatgagatacctaattagaaatgctttaattaattatctatatatatatataataagataattatctatagatttaaatcaaatatgatttgatgagataactatctatataaaataagatttgataaagataagattttattaggatttaaataaaataactcatgtatatataagataggtgaaactgacgtactacataaaatttattattcactattgagagaaaaaagtgtgccacaccaaatcccttcacgtctaccataggctagcaccgagatcccgctccaatcgttgctagtgtgggttgagtagaggcatcatactttcgacacttagtgatcaaaagaaaccttgtggtttgaaagagcactaaaaggtagcccctaaacccttagtgattgttgagtaatgcgtggttcatgagatggggttctttctgctcatggtctctttagaaattttaaaattatagacaatgaaatcccaacatcaactcttagacaactaagctttctaagtagttagtcacaacattcattgttaaatgtttgatatgataatgtgaatctaatatcaatgcacatttgttcatgtttagaagttcattacttaaataaaatcatttcttagaatattgttatcataaaaaaatcgatttatgttatgcagatgcagtactaaaaatgtcctgttcaaaaagttatagttaagaatgttgtttccagcttttcatgctcaaaagtgttttcatgttttatgaaagcttccatactttgatgggtataattgaactagtttaaaatagatcttgttatcataaaaatgatttagtttagatatgccattttataaagcaattatgctttttatgaaaaccttattatgtatgcattttgattaaagtaattctaatgttgagaatgttttgatacaaatgaagtatatatgacaacaaataacataatgtaaagaggaaaataaaagaggattcaacacaaggattttatactggttcaccttaacctttggctgtgtccaatattgactcaaattgatgagattttcactaatataaccaacaacatgttggaccaaccaaatgctagattcttccaattccaacaccattctggaatttccttgctaaccctctgttggactttccttgatagtcacctattggactgtcaacatctcctcaccacaacaccacacttggtgtttgcttggagatcacccactcaaccatgacacccacttggtcatgggagagacaaaccaagtattctccacctcttcaggtgggcttacccaaaaagtaattcagttcctgggagggaagatatctcaccatagaacttcctaagttcttgataggcaaccttcacctctcacttggtgtccctctctagaaaactctcctcactcttgggaagcaacctatctcaacaacaacattgcccctactcatgggagagacaatccaagtatttaccttcacctcttcaagttacataagtattattttactatagctttttcaggctacactcttatagactctctctaagctactcattgtccatgggttctctttatgaattatttctcagccaaacttaacccacatagttaatttgggatacatacaaattacatacaaggagaatgtgtttgaggggattttacaacaaaggaacacccatgtgttagatcttcattaatgttttggttgtacatcactctagttgcttctttttggcgcataaaaagatgattgagggtggaaagaatgtttttcttattatgtagtatgtaagttgtctcctaccttctctttcatgttttgcaactgtcttctatcagtttataggtcccataggccaaactcgttgttatgacaacttagtctttttcttttctcttttcaaaagcttcattcaagtctaaaataccccaagaaaatttttgttggaagtggggcctttagaacaacttcttgcaaaagttgaaagtgtgtcagttgtacttgacttgacaagtctaagttcgttatgaagttttccattctgaagaacaattttgataaacttctaaagttatattagaactgcattttgatgttgctacgaaaggatcaattctaatgtcggttccttcttatgaagataacatgatatgacattgtatgtagctcatcttactccaacaaaggtaacatgtgaaggttgctgttgttgttgtgttagtgttctgtcctttgttcatacttcacaaagtctgtctagttttcattctgatgatgtacactagagcttctcaagtacattctcaactttcaagttgtgcatcttcaaatgcaatcagcatttgctttctaatgtgcccctagtgtgtatggcagcatatggaaagtgagatgctatcaacctcaatcttttaatgtgcatgttgtatgtgtggcaacatatgaaagacatggtgttgctttgtatcctattctgatgtcaactccaatcttattctagttagcttcttcaaaatatcattatgatgtcttcattcttatagtcctcaattacaccattctgatttgacttcggtgcaactttattctgatgttgtatgttcattgtagcctttgataaatcttctaattaaggccttcttaatgtctttgcaacatattaaggttgagatcttcatagggaagcaatgacttcatcaacaaaggacttcttttaaatgttgaagcttctcacttgaaagcataattgaaacatccattttgagcttgttttgaactcacgaaaagaatttatgttttgctctttgtatatctttcattgtatcatttgcatatcttaccttttcctgcatatgatgcaaatggaaggcaactaaatgttcttcttaggaaaatactttggttagatggcatgacatacttgtattccaaacattcatgtgtgagcttgttgtaacacgttgtgtttgttactactttttatttctttgaccctttgaatggccaagatggagttcaatgtcttcataagagttgtacataattctatccttgacattcatgcactggtctcatgtcggtttgacaactacaacataagcaatctttatagcattagaaatgtcttatattatgaggacaaaataaaacctttatcttcaagattcgttgtttacaagatccaagccatatcaccttatgacttcttcatgaaagatttagatatttttcttagatttccacaaccactaagatcatctcaaattcacgtttgtagcttaagcagtcttcaaattaatgcacacatatcaagttgtctaggcaaattagtgtctacaaattcaagctcaattttgtccatgatttaggttgtttcataccatgacttgttcacgaaagttgaatatcttcaagcttttcacagccatcaagaacaactaaatttcatttctataacttcgaatatgatgtccagaatgaactcatccattatgagtgtgttgcaatagtgttgttattcatgattgctcatagtagttctatctaaagcaatgttgatgtaggtctaaacccattagacattaatttcccaaatctaccttgcaatgaaacccaatcttcaagcttttcaagaacacaagttgtccaaacttcacgtgaaacacatagctggttggaagctttaatttacaacaatggaagatggagaaaggttatagataaagatggaatacaccatagagaagctctccaataagtctaagaagaatcgtcacaatagcattgagaagccattgataagacccccaagaggttcttgcacaagaataagagagaaactctcacaaatttcagatttccattaatatgaacaaagttgttacattcaatttttggggcagcttatatagccacgaaattacaaagcaaatgcacatgaaatgacattaaaatgaagctcgtaatgcaaactaaagaagcctaattcaagctaaatgaagcttgaggtgcaagcttccctatgtgactcttggctgatccaatccgtgccaatggtggagtattttaacttctaagtgcagccaacaagcttacttaggtgcttcataaattacacacaagtgcacctacacccttcacacaattacactaaaaaacctttttactgtcactacttttgctactaacaagtgctggaatttatggaattaaattgaacttgatacatcaaagtctagcccttgttatccttgagttggcatgcttcttcatgtttgtccgagttagctttgatgtgttctcgaagggcttgagttctagctcttgtcatgggtcctctaaagctcatcaaaggaagctcttcaagttctccttctagacctttagcttgcaatggacctccatcatcccctccttcttgaaaggaacttgaccttaagtttgcttcctcacttgtacctacatcacacatagaaagatcacaaacattgaaagtggtactcacaccatactcacttggcaactcaagtttatatgcattgttgttgatcctctctaaaatcttaaaaggtccatctcctctaggttggagcttggatttcctttcttgaggaaatctatccttcctcaaatgaagccaaaccaaatctcattcattattcttgtgcttattggcttgcttagcatattgttctatctttctctccacatgtgccttcacttgttcatgcaatttcctaacataagaagctttagacaaagcatcatgattaatcatagaaaaagtgttaggtaatggcaataaatcaagaggagttaaaggattaaagccataaacaatttgaaaaggaaacaaggacatagtcttgtgaactactttattataagcaaactcaatgtgaggtagacattcatcccatgttctcaaattacccttgatgtaacatctaaggagttgacctaatgtcttgttcaccacctcggtttgaccatccatttgagggtgacaagttgatgaaaacaagagttttgtaccaagcttaccccacaatgtcttccaaaagtggctaaggaactttgtgtctctatcactcacaatatttctcagcaatccatgtagtctcaccacttccttgaaaaagagattggctacttcacaagcatcatcactcttgtgacaatgaatgaagtgtgccatctttgagaacctatcaagaacaacaaatatagaatccttttccctcttggatcttggtagaccaagtacaaaatccatagaaatatcaacctaaggggagttaggaatatgaaaaggtttatacaaaccatgaggcattaatctatatttagctttatgacaagtaacacattgagaaacaagcttatgcacattatgcctcatttttggccaaaagaaatgttcatgtaaaatagccaaattttttccacaccaaagtgccccatcaaattgttttcatgagcttccctaatgaaaagttctctgaaagagtttttaggaacacatagtctcttctccttgaacaagaaatcatcatgtctaaaatatccttgatgagcccccttctcacacaaagcaaaaacactagagaagtcatgatcacttgaaatacaattcctttatgtgattaaaaccgagcaacttagtttcaagcatagaaatcaaacaatgcctccttgataaggcatccaccaatacattcaattttccttgcttgtatttaatgacataaggaaattgctcaatgaattcaacctacttagcatgtctcttgttgagtttgccttgacttttcaaatatttaagagactcatgatcactatgtatcacaatttccttaggcaaaagataatgttgccaagtttgcaagactctaacaagtgcatactaaaaacaataggaatacccacaataagcaaaagggggggtgaatggtttgatcttagtatttaaaaaaatatttataaaatcagagttaaaggatcttaatcacttttaaaccaagaatgtttttaatcaatcaaatttctcagctaaagaaatcaatagcttaaaatagaacttgttgagtaatgataataataccaagaacaaatgaataagataattgatagagatgaaggaatagaaaagcaacccaaaaatttatactggttcacttctcaaaagaagctacatccagtttcttctaatcaacactagattagagttccactatcataaattccagttcttacaagctttataacaaactctctttatcaaccttagataaagaatagaaatctaaaactctattagacttctagtgaacaagaatcagagaacactactttgttcttccctagaaaacactattctagcataagattcaaagaacccttttacaatagcatcaaataacaaacattacaaaaacgaatttacaaccaaagataatagagagaaacaacctgatgatccaatgaatatgaatgcatgtgagttaccaatcagagttgaattgcagaaaaagaatttcagaccatgctttccaaaacttctttgaaatatcttgcccaagaaatcattcaatacccaggaagattaaagagtgggacaagaacttagttaacccagaaaatcactttctaactttgagaaggcttgtgtatattaaaaaatttgaagtattcaagttaagtttcatgacaagccttcttcctatttataacagctttttataacagaatgtaatcgattacacgcgccaaaatagctcaaagctccattcttggtttcacaacgaacaaaataatcgattaacccgagcagtaatcgattaaatcagagaagttttatttcagaagcagcttgtgtaatcaattacaatttacggtaatcgattaaagcaattaagtaagctttttcaaaatagcttatgtaatcaattacgattaacggtaatcgattaaaacaataatgcacaacattcatttttcactatgtaattgattacaagagttgtttaatcgattaatatggtcatcaaagcttttccagtttcaaacacgaaccaaataatcaattaaaccattgtgtaatcgattaaaacagtaggattacatttttccaaaaacattcctcaattaattcctttttcaaagtgtgagtagctttgatattttaatgaaaacatttaagcatgttaatgattatgtgcatgcaatgcaaggatcaaaagattggcctctcatacacttcatatgaattacaatcttcaaggcatgtgaaaagctcaaaactttcttttaaatcataagcttcattcttcttgttgctccccctatatccaacaatctccccctttttggctttgaacatgccaaatattagattgaccatgtgtttgatttttgaagtactttgagggatgaaaatagaagtcttgaactttgttaacctgaaaacaaatcagcctctttgccaagaacaagtgttaagagatatgcttgcataaacattaatcatttactttcatttttgagcacaacaacttccaacagagatatactcaacttcagctgttgataaagcaacacaagattgcttcttgcaatgccaagatattagtgagctgcctagtaggtgacaagttccactagtgctttttttatcgaatttgcaccctgcaaagccagaatcagaatatcctactaaattaagtgatgcacctttagcataccaatgaccaacttttggtgttgatttgagatatttgaggatccttttgactgcagtgaggtgagattctttggaatttgctagatatcttgcacacaaacacactcaacataatatctggtctactagttgtcaaatacagtaaagatccaatcattcctctaaatcttgactcatcaactttctttcctttttcatctgaatcaagataagttgatattgccattggggttgcagcatctttacttttatccatttcaaactttttgatcacttcaaggcaatacttggtttgatttagaaatgtcccattcttcatttgcttcacttgaagtccaagaaagaatgttaattcccccatcattgacatttcaaactcattctgcatagagatagaaaattctttggacaacaattgattagttgaaccaaaaattatatcatcaacatacacttgaactaataagatatcattgttttgccttttgatgaacaaggttttatcaacatgtcctcttgtgaaagattgttcaagcagaaatttacttaatctctcataccaagaccttagagcttgttttaaaccatagagagctttcttaagtttgaaaacatggtttggatatttaaaatctacaaaaccaggaggttgctccacatagatttcctcctcaacatatccatttaagaaagaacttttaacatccatttgaaaaagtttaaaatccattaaacatgcatatgcaagtaataacctaatggcttccaatcttgcaactggtgcataggtttcctcattcaatgccttcctcttggttgtaaccttttgcaaccaatctagctttgtttttgactatgattccactctcatcaagtttgtttctaaaaatccatttagtgccaataggtttgagagaagaaggtctaggaacaagttcccaaacttcatttctcttaaattgattcaattcatcatgcatggcatgcatccaatgttcatcaattaaggcttgatcaatgttcttaggttctatttgtgaaacaaaagccatattacaacagagatttttcaatgatgatctagtagatattccctttgaaacttcactaatgatattgtcaagagagagatctcttgtagttctccaatcttttggctcttagactggtgttgattgtttagcttcaacaattggttcttctttttctttatccattgaatcattaagctgaatgaactcctccaaaggacttgtatcaatatcacacttcttttcctctttggagggattagattcatcacaaataacatgtactgattcttccatgcacaaggttcttttattgaaaactctatatgctttgctatgtaatgaatatccaaggaatatggtttcatcagctttagcatcaaattttccatgtgattctttaccagtatttaaaataaatcacttgtagctaaatactcttaaatgagaaatatttgattttctacctttgtatagttcataaggagttttctttaaaataggccttattggtaatctattcaaagtgtagcaaactgtacttacagcatcagcccaaaaatgtttaggtaaatttgtctcattaagaagagttcttgcaccttcttcaagggatctatttttcctctccacaacaccattttgttggagtgttcttggagctgaaaaattgtggttaattccattttcttcacagaatttttcaaaatgttcattttggaattctccaccatgatcacttcttattgagataatttttctccctttttcattttgaacaagtttggccaattttctaagagcattaaaagcatcactcttggatttcaaaaacaaagtccatgtgaacctagagtaatcatcaacaatgacaagcctatagtaattaccccctaaactcatagttctagaaggaccagacaaatctatgtgaagtaattcaaggggtcttgaagtagaaataatgtttttactttgaaaagaattttttgtttgtttccccttttgacaagcatcacataatttgtcattttcaaacttgagcgtaggtaagccaatgactaaatcctttttaataagcttgttcatataatgcatgttaatgtgacttgcctttctatgtcatagccaagattcatcaattttacctattaggcaagaagtgttgtgaaagaatgcatgatctatggagagtaaatagatattaccttttctcttacctatatgaatcacctcaccattttgtccatcacatatcatgcagcaattgtcattaaatgacactttgaaccctttaacacaaagttggcttatacttaagagattgtgctttaaatcttccacataaagaacatttctgatcatggttttgaaactgtctcctatgtttccttctccaattatcttccctttgttgttgtttccatatgtgacaaattcaccatctttaagagtcaaatttgtgagcatttgtaaggacccttatcctttttcttttcggcgcttaaccccgcgcgatagcgcggggattcaggttagaaagccggtgaaaggtgcttaaaaatgcaagttttatggctgttctggcatatggcgcgacccacttgaagggtggcgcgacacgcgccatatgtgttatacagggcagatggttctgccgtgccacgcgagtcgcgtgaagatccacgtgagtcgcgtgggaagtggtccagaaagcatggtttttcactggaactccacgcgagtcacttgggatccacgcgagtcgcgtggaaggcccgaagagatggcgcgagtcgcgtgggaggtcaagtgagtcgcgtgagaacgtcggcagaccagtttttaaaggccaaaacgtgagaaatggaggatatttccatttcttcttcctcccttagccccaacctccattgttaaagttctaaagctccttaggacttgattctcagcctaaacacttccctgagccttagaaacttgattgaaccgaatagaaagcttgaatccttcatcaacttctttgaaaatcccagattgagtgagaagaggaacctcagagggaaaagctcggagaactcgagcttggcgcagaaccaccgcgtgattgggacacaggagcttaggaaagccgtcctgaggtgattggagtcgccactgaggtaagaaacgcaagtttcaccgtttgattttgattctgggggtccctgtgaatagtgacccatatgagctggggctagaataagcccagggtccagttgagaaagttgatcagggcctagaatagatgaaggattagctttcagtttttgattctgatgactttggattttggctctgggatttgtctgtgtggcctgtgtgttgtatctaccttagtgtagaggccattccagagcttagactatgtctgttatgagcctatgaggctagttgaatggcacctggatagaggttaggccattcctgtggtttcgaatgtgaggaggctgatggtttctgccatgatatagccttcatgttatgatattatagcctagtgtgtgctaggctgaaatggttaaaccctaggacagaggacttatgtggttatgtgctgtgattgatgcctgtggtctgtatattgatatgagctatgtatgccttgtataggcgttgattctgagcttattggtggcgggagccacagagcagggactagaccacagggtgatattgtcccaggtaagttcagtgtttctggggaatgaattcccgttttggttgcacaccacactcctggggggtgttggtcatgattcatgatgcatgcattggctgtgacattgtttgtattgagattatgcatctgcatttgatttgtgctgtgtttgagatatctgttggccaatagatagatacaggcgttgaggatctccgccgtgtatcatgggcgttgaggatctccgcccagtggcatcgaggatctctgccacaccatgacaggtctgacgttgaggatctccgtcagtggcgttgaggatctccgccaggcattgaggatctctgccacctgtcatgtgattgagattatgatttgatttgatatgatgaggccagagggccatgtatgatgcatataccggttggtgtgctgtgaatctgtgggccagggtggggatgatttcccgaggaccctgagcttactgagatatgttatctcaccccgggtggggcttatatgatttcaggtaatatatcaggacgagaagatcagtcccagggcaggaggcccagttgagactaggctgcttgatggagaagcggcgtggagagcttgaaggctctattttgttttgttttgatatatggttctgtatgccctcatggagggctgatattcttttgtagcaccacggcatgtgtggtgtggactctgatgtatatgtctgtacagaactttgatgatatgtatatgataatttccctgagtacatgtgtatgttttatttgttattactctgcctaaagatctgttatctgtcttattatgatattttgatgaactggatcagcaggggcgtggtttatgtttctgtataggtgtgttatctgttagatttatattccatacataatgtatcaagaaaacgatcctgtgtttccgctgaactatatatttgctatttcatacgctaatctgatattattaatgataacacgtcggaggcctacggggtgttacagcattgatatgtcaccagtcatatgtctagagcattcactatcaagataccataatgaagatcttgctcttagacatatttgcaaaattcaaatcaatttatagaggaaggtacccaattgagattgggttcataagggttagctattctccttttctttggtagccaaattcattctccatttggcacatagaatttcctagcatagcatttattagatgtgtgacctttcatcatacaatagttacaagttactattttttatgctctttcaaaataagtcatgcaattaaaccttggttttgagacaactttttgatatttctgttttggattcacaaacttggtttttcataagattttgatccttttttgtaacccaatccagaagtatctctagcatatttttgcacacttagcatttcagccaagttacattttcctttataaagccttttcaagagatcaaccaagtgcttattttctaaaagtactaccacatgtttttcaccttgactttttttgaactcatcaaactctttttgcaaatcatagtatttgtcaacattagatgaagaagaagcacatacacatccactcattttgtaacttgaaacaagtttttcattttcttctttcaagttacaaatctcagtttgcaattctgcaatttttgtaatatgccatctaagatttccttttagcctattattggattttgcaagcttttgagcctcttcatgcatttcttgaaaagcatcgacaacttgatcaaattcagaagtttacctcagtttcagcacttgagaattaattatcttcatttattgtggaagtgagacacacatttgcttcttctttttcagttgatgattcaaaagttgttgactcattgtcttcccaagctatgtagactctcttaggctttccttctttctttatcttgctttcaccttgttgctttttcaaaaagatagagcattcagatttaatgtggccaagcttaccacattaaaagcaagtgaaattgttgtcactccttttgttgttattctttgagaactttttgttcttgtctcttctcaagaacttgctgaactttttgacagttagattcatgttgtcctcttcatcttcacttgagtcttccatctttgaggatgcaactttcaaggctatgcttttttgtttcttttttgcatcttctgcactggttagttgtgacatttcaagttcatacttaagaaggttaccaaaaagtgcagccatggacattttggatagatcttttgattctttgattgttgtcacctttggttgccatggtcttgtgagacacttcaagattttgatgttcaactcttcagcatcaaagatctttccaagaccaagaagatgattaactatgtgagtgaatcttatttgaagctgagatatgatttcagtggtgttcatcttgaacattttatactcatggattaaggcatgttttctcgatcttcttacttcgtttgtaccttcatgagttatctccagcatttcccacatctccttttaacttttgaagctaacagttctaaagaattcatcagaggaaagtgcataagtaatcatattcttagctttaaaatcatattgaacaactctcttttcagcatctgtcatttcatcccattttttgggaatcatatcattaccaacagtttttataggaataacaagacctttttctatagcattccaagcacctgggtcattcgattgaataaagattttcattctatttttccaaaaactgaagtgctctcttcaaacattggaggacgattgagggaggcaccttccttgaaggtcatttgtgtggtattcattttctttaaaagaaagatagttgttaacgatttaatacgcttcaatacggcaagtgcaccgatcgttccaagtaaaaaaataggtaagtgagtatcgttctccacagggattggggtgatgttcacagtaatgaagaatcaatgtgattgaaagtaaagaaaacagaaaattttgaaaagaattgttgtggattgaattggttgtttaagtgtaaaaacagaaattaaagaaaacagcaaatcaaattgagaagttaccaatggacgaataattgtggtcaggcgcaatcccctctgattcctcctctttcacttgactggtttattggtttaatttacacaaatgataaatctctcctaaattcgtaaatcctagataacttgcgatttagccctttaattcaatcgagaaccctaatcccttagcgattctgtcaaactaagcatttagagaatatatcatatgggtttcttgttataattgttcagagaataagtcttttctagattagttaatccctaatcccttagtgaattaaccctttaacctgaattgaaaacctaattccttagtgaaatctatcagtttaagcatttaaaagaccatattataatttttgcagccacgcatccctatccctaggtgatgaacaactgttattctaaacaggtcagaaattagaaccccaacgtccccattgcgaatcctaaccctagatacttaattgaagtgatcaattccaaataagaatagaaataagtgcagaatataataaaacaatcaaaacaatattattcaataccagtcaaattacagaggagtccacatcagttcatagccttcccacaatacaagatttagcctgccataggcctcaagaacatcaaagctgttgaataatacatgactgtgctgaaaccctaccttgattcttgatttccagaggtttttgaatgatgtttgcaatgtaaattatgatatggaagtgtatggaagcatcctttcttcaatctagaggcttttcttttatagatagatttaattagagtaacaaagcctaaactgtgctcaaattcgaaacatataaatctaacacaagcaacaaaatcttcatggcgcgactcgcgcgcgatcccgcgctaaccgcgcgaacctttcgaatcaacgacgctgatcgcgtggacctccacgctaatcgcgtgaggtcttcaagctaaatggcctgagattggagttcctggcgttgatggcgcgtctctggcgcgatccgtgcggcggcttcgaatgattggcgctgatcgcgttgtaatggcccgactagcgcggggtcttcgagctagcaggttggttttctatcatttggcgctactggcgcggattttggcgtgactagtgcgacttgtttgagtctgaggtctgttaatttgcaagtggcgcgacccgcacggtgactggcgctatccgcgcggtgccttgaatcttgttttcttctttcttttgccttgatcctcctctttttgacctgaaagtgctcaaatggtaatgaattgaaattggagacaattaaaatgataaactaactaattctattctaattcctaacttatttaactaaattatatcctaagctagcctaaaactaagatgtgtttgcaacacatcaaacaattcccagatttgaaagttgctgtccccagcaacagaaagaattcaagactaagcaagaatcaataatcaaacacaaaccacagtttactatcctagaatcatcatgctatgtacgatcaagttcacatcaaagcttccatggcactttcaatgctgtcaattcatgagaattacttgagtattcctcacaaaagttgtgtttaatcactcattcactcaagtgtataaggttatgatgactctcttactcaacaaagtcacagcactaccataagcttgaaaatattctcaacagttgcaattacgacttaatcaaaaggtctttccggcttgtaacgtggctgggctaaggataggaaattctttggataagtagcttaatgagaggctggatccagtcccttaagtccacaacatgcttcttgtcttctttttcaaaacttggtactttatttaacaatttattctaaagtaaaagcggaataataaacttctttttgatcttttttttagaacaaaacaatgtaaacataagcaaaataaaaattactgcaacttctcaaaattctagcttgatggacttattattttccaacttggttcatgcttgtttaatcccattcttcacaaccaattggtttcacttgtatttcttcatctcttgatggacaattccctgcatttctgctgttatggacttatatcagaccttttctagcctcagggggttggtcaaatggacatggctctgatttgggtaattgaaatgaaaggctcaggctcaaatgaggtgcaattggaaaacaactgattggtgagtcaatttggccctagtttcagaagaaaaatttgccttaatcatatcaagtcacacctgcatccagagaaacaattcaagttctagagtacaatgaaattggagtctctcggaaagaaaacattaccactgtttggctcaaatccttataggtgttagaactcaagtcaatctcagctgactatatttcaagcatcatttcaacttcaacatgcatttcacatatcaataatcaaattctattcatgcatcatgcagtccatgctatgtttcatttcatcaagctttcatcaagaaatccatccattactgtgttcattcactttttgattctgaaaaatttgatgtgctatatatataagtgtagtagtgtaaatgtgcagaatgtatgaaaaatgtctcgtgcaaaatctaaaataaaaccaaaaactagaaacaataaaaataaacagaaaataaaactatgtcctgatcactcctctcctactcctctctctacaatctctgcagcctctaatgtctctggtggtgcaggaatagaaggctctgtagctgctgcatttgatggaatatgaggagtctctgtggctggaggtgtggtctctgctggtgtagtagtgtctatagttgcaactggtggtggtggaatctggtactgtgatgaaggaatgcctaagtgtctgctgagccagctgggacttgatgaactcttggaaggccagatagctgggagaatctgtgtagagctgctcatgcccaggagtggaggaagaagaaggagctgtagctggtggtactggtggtgtgtgcatttgctggtggctgggctggctggggatcctctggtgcaagtaagtctcgggggctgcgggctgctaactcctcaggtttgagctttgaagctctgagaatttgctcattagctgctgtctccatggcatccaaataagtcttgtgactcataagtgaggagatcgggacatccgtgggttcgtcatccgtaatttctacccctgcctggcggcataactgtagaataagggaggggtgtgccagccaggacttgctgctagcgtcctgtatcatgtgaagaatactatcagagagaaggttagagatgagaaagttaccatcacctctgagtgtgtaaagtagaatcgctctctctatattcacatcagttatattattggagggtatgactgtgtgattcacgaactaatgccagaaagctgcatcgccaatcaaatcatgcttccgcatcttctctgggatatagtccagcccggatttaggcttccaagcagtgtataaacctgtgatagcccttctgatagtggtggccagctgaggaacttcatccctatacattttggttaatgcgtctggctgcatgcggaagaataaatcatggaattcacaaccctcaaatgggtcatactgggtgtccaatagacgctctatagctttgtcatcaaaagaaacctggacacccctcacccaagacatcctggtcctatatacggtgtctggatcaacattcgccaaaaactccttcaatatcatgctggagctaggctctggaaaagtgataagcctctgccactggcgtctgagaatcactgccctcaccgggttgtcttctggtagcgtttcccacaaaattttcttctcagagatgatcttcttttgtaggtaccaggaatcaaagcgttcttggcactcagccgtcctaaaacgggcctcatcaaaatctgctactcgggccctctttgtgcctcctacttctgtggccttcttcttgcccttggcggcttgcttaccctgaaactcagaaaaattcaaatatatgcatggtgaagcaagtgtaattcccagatttgtgttcttcattgggtcagaacaacaacacttaatattaaacacaaagtggtgaatgatccatcatttagcaagtattgatcagttcagttataatttcattcatatgaaaaccataggtaccacgaacaacatattccaacatggattatcacttggaattcccagatcaagactgttgagccttacaacattatacttaaacagttcagtatcatcaatgtaaaacaattatagcactaacatcaagtcaagtaattcacatttcagcacaaaaggatccatgtataatacaaggattaattcagtttgattacaagcatcagatgggattcaacaattccagatttaattcatgacaatactcgaaaaaatccagtcatgttatacaagcaccttctgtcaaggaagtaaatggtttcatctggattcagtttgcaccctacaataacaattaaaatagtaccttcattatcgaaattcaaccagagcacccatattattttcaagcagtttaagtttccaatccacttggtgccattgattttatccatacatgggtgcactattccaagatttgagtgcctcacatactcaacaaagcaaaactcaggtgtttcaagcaattcaatacaagacataacaatccctagatttatctaagtacctgtgcaaagcttgcttaagaatcttttatggttagcacaattcaatcattcaacagatatcagtttgtgaagtttaatgtgtccaccacaattcagtacatttcaaccaattcataatcaaccaaacattcaacttattataacactcaatgcaatacatcgttgacagatcaaggtgacaattttcgatttagtttgatgcagtttacaccactatccacaatttatccaaattcatttccccctacaggtgaacacaatttagtcctcgtatgcaactcaattattagctagtaatgtcttaaccattttccaacagattcaatggctcaaaacaagcaaatgcaaggccgaatgtattcaattaattcaaatttctaaccaatgcatttaggccttgttacatcatatcattcaaattattgaagaatctagctcatattctcataagtcatcaagacttgaccacattacaatccaatttctcattcaggaatttgcacaaaaacgtaatgggcatcaaagcaatttaattcaataagcctattttgatcatatcacattcccatttgaacaaaatcaatatccagtaagcaaaaagggcaagcaattcaatttctatcctaaggttttcagaatgtcttatcagaaatgcatgttaaaatattgggcgttgggtttctactgttcctatttgtgccattattcataaccaagcaattaaggttcagaattgtaccttgtcaccaaccattataaaaattggaagcttttggttgcagcagaagattatagtggagagggaatgacagcaaaagagagtgctggtttgagaaaatgagaatgaggaagagtgatttggggcttttaatggtgagcaaggtgagtgagagtggttaatggaggtttgatggtgtgctgaggtgcaggcgagaaagaaggagcaattttggaacagtaatggagtggccgcgaatgaggggattcaatttaaaaattgattctgcgatgctacgcggatcgcgcggaggatggcgcagattgcgccatgaagaattggaaggttctttgattcgacttatccgcgtgattagcgcggcctctcacgcagaccgcgtggaacctttaaaattagcagccagggtcgaacaactggcacggatcgcgccactactcacgctgttcgcgtggtttaatgcaaaacaggtcttatggctcgagtaactcgcgctactcgcgcgggattcacgctattcgcgtggtcaatttgaggccttggagctggtagcaccatacctggcacgagtcgcttcattttatgtagaaggagctgctaatacgagcatgtcacgcgattcgtgcgactttcacgcgattagcgtggatggatcgagtggttggcgctgatcgcgccactcctggcgcgagtcgcgccatgccttctgaacagcttttaatcattctttttatttggtttttaattttattgacttaattaaaacattatctaaattaactctaattaaaacaagtatgatgatggacctaagctatcagagtttaaaataatttgaattcctaattactaatgcatgaacctaactaacttctatggaatatgcagaaggaaaaactacaaatgataaatttactgctagcaatcctaaacaagaattaaatcactatgtacattaccagtgtgctttgtttaacgtcttaagctagacacttactttcatttaaacttcagtggcattgagtggaacagaagctgaccttctgttcacttctcccccaaaataatgttttaagcgataaccgtttaccttaaaagctcgatcactatccaagggtgagattgccactgtgccgcaaggataaacttctcgtactaggaatggtccagaccaacgtgatttcaatttacctgggaagagtcacaggcgagagttatataacagcacttgttggccaggaacaaactcctttgggcggatttgattgtcatgccacttctttgtcttttctttgtagattcgggcattctcatatgcagctaacctaaactcatctaattcattcaactgaagaaacctcttttcgttagcttttgttagttcaaaatttaaaaatttggttgcccaaattgctttatgttcaagttcaatagggaggtgacaagccttaccatagacaagctgaaagggagacatacctattggagtcttaaatgcagtcctgtatgcccacaaagcatcatctagcttcttagaccagtcctttcttgatgttccaacagttttctcaagtatgcgcttcaattctctgttggaaatctctacttggccacttgtttgagggtgataaggagttgccactttgtgcttgactctgtactttgctaacaagctgtcaaattgcttgttacaaaagtgagttcctccatcacttatgatggctcttggcactccaaatctggtgaaaatgttctttctcaagaataagaccaccaccttggcatcattggtgggtaaagctgctgcctcaacccacttggaaacataatctacagcaaccaagatatattggttggagaatgacttagggaaaggtcccatgaaatcaatgccccacacatcaaacaactcaacctcttggatgttgttgagtggcatctcatctctgcgagaaacattgcctgtcctttgacagttctcacactgcatcacaaagttcttggaatccttgaataatgttggccagtagtagccacattgcagcactttgtgtgcagtccggtttgctccaaaatgtcctccataattagaggaatgacagtgccacagaatatccggcacgtcactttcagctatgcatctgcggataacattgtcagtgcattgaaaatataagtaagggttatcccagaaataccttctcgcatcatgcaaaattttttttctctgctgccaattgagatcttcaggtaaaattccagcagccttgtagttgaccatgcttgcaaaccatggactgatttgtacagcaagtacttgctcctcaaggaaagactcattgatttcaatctttggtccatcttgcaagtccttctcctgaatcctagacaagtggtctacaactttgttctccactccagccttatctcttatttcaaggtcaaattcttgcagtaataacatccaatgcaacaagcgtggttttgcatcttgtttgtgcagcagaaatttaatagctgcatggtcagtataaacaattacttttgaccctactaagtatgatctaaatttatcaagggcataaacaacaactagcatctctttttcagttgtggcataatttacttgtgcctcatttaggattttactagcataataaataacatgcaagcgtttttcttttcgttgtcctaaaactgcacctactgcataatcactagcatcacatattaattcaaaaggcaaactccaatccggagcaatcaaaacaggtgcagtggtgagtttttgctttaaagtgttgaatgcactaagacaagcatcatcaaatgtgaactcagtgtctttctctagcagttggcttagtggctttgagatctttgaaaaatccttgatgaatcttcggtagaaacctgcatgtcctaagaagctgcgaacaccactcacattaataggaggaggcaatttctcaatcaataacaatttagccctatcaacctctattcctatttcagatattttgtgacctagcactatgccttcccttaccatgaaatggcatttttcccagtttaaaactaaatttgtctcttgacatcttttcagaactttggctaaattagctaagcaagaattaaaacaagggatatatcatacctgcatccaaaagcttaacaacttcttttcttaccacttctttcattgtgggattgagccttctttgtggctgccttacaggtttaacattagtttccattagaattttatgagtacaaaatgagggatttatacctttgaggtctgaaatagaccaaccaatagctgacttgtgctccttaagtactttgagcaatttttcttcctcaaaccattccagccctctgttaatgatgcctggataagtttcattctcacctaggaagacatatttcaaatgttccggtagttctttcaattcaaccttaggtgctccggttgggatgtcatcttccttcatctctaattcctctaacaccaattctactgtattttctgcagttgcagggctagattctgcagcagatattgctgctgcacttgctgtctcctctgctgcatattttcctgcacagtctgcatgtatagctgctgctgtttcttcttctgctgcatatttttctgcataatctactgctgcaacaatttctgcttgatccttagtttcagttgcttttaaacctgctgtaatacctgcacaaataacattatccaatacatctagcctaaaacaatcatgttcatcagctggatgtttcatggcattaaatatactgaatacaacagattcatcattcagtcttaactcaagcttcccttgctctacatctattaaagccctagtagtggctaggaaagaccttcctaacagcagagggatttcactttcacccttcatgtctaacacaataaaatctgcaggaaatataaatttgtctacctttactaaaacatcctcaatcacccctgagggtgttcttaaagacctatctgctagttgcaaggacactctagttggtttaagttcagatatgcctagggacttacacatagacaatggcattaaatttatactagcccctaaatcacaaagtgctctccctacattaatgtttcctatggctataggaatgttaaaacttccaggatctttcaatttaggaggaagcttcctttgaattattgcactgcactcctcagtgagtgctatggtttcacaatcttgcaacttatgcttcttagatagaagttctttcatgaattttgcatagttaggcatattagctaatgcctcagcaaatgggatgttaatatgtaacttcttaaacatgtctaagaacctggcaaattgttgcttctgcaattgttgcttggtctgcactggatatggaggcttttcaaagcaagaaaagtcccacttctttggttgtagtgcagaatcttgctcttctaatttttctgtagctttttcttttggttcagctgccgcaattttcttctcagcttccttttcctcaggcctttcaggttgatgaagtatcttaccacttctagttgtgatatctttggcatgttcccttgggtttaccactgtatcacttgggaactggccttgtggtctctcagccaattgttttgcaagctggccaatctggttttccaaatttctgatggaagcgtcttagtttgttctgtgagctcttgttttagctatgaattctgctgttgtttttgacagctgcaacactaccttttcaagttcagagggctccttgttgggaataaggggggctacaagtagttgttagacttgtagtctaggccacctccttggaacttcctttgatagttgtttccagcagaaaaattgttattcctctgataggactgttgctggtatggttgttgctgtctttgatcattccaaatgccatttacctgcacagggtcagcaccaacaagaatagggcaatcattagattcatgctcaccttggcaatactcacagaccacatgtggttggctagctgccacttgggctgcagaaacttgcagtctattaatcttttcagtcaatttggctagttgttgtgccaaaattttctgctctgcaagcattgcatcattagtggacagctgacttggttctctctttggctgatgtgttatactttcattttcattctgggccaaagaattgataagctcatatgtttcagttgctgttttagaccttatagtcccccctgctgcaacattcacaatcctacgagtgtcaggagtcataccattaaagaatatacgtacctgcttacctacaggcatatcatattgtgaacacctcctaatcaattcttggaatctattccaagcagcacatagggattctcttccagtttgagtaaaattggtgatttcattcaccaatcggttatatttatccatggaaaagtattcagcaaagaaccttaagactaagtcctcccaagttaagatgctattggatgtttgacggttcagccatctcaatgcatttcccttaatagcaaagggaaataagcttaatctcactgcatcatctgagaccccctggtgtctgatagtgtcacagattctgagaaatctgtcaatgaagtcatgtgggtcttcaaagtcctctcctccaaactgactgcgctccaccaatgctatcaatgaagggtttatatcaaagtgattagcctgtataggtggcctcacaatactggagttaggtcttgtgaacataggagccagaatatcctccattagttcatcttccggtctccgtcttggctgattaggttgttcttcagccatttcttcttccgactctaattcaggaagtgaatcaaagtcaaatttttcagcttctctccttctttgtctagctagtccccgtcggtttgttctttctatttctgggtcaaattgtaaatcctaagaactaactgaacctcgcataaaacttagagaagcgattagtaacaaaaatttcaatcacaagatcaaaattacagtaaaaatccgttaaccagtccccagcaacggcgccaaaaacttgttaacgatttaatacgcttcaatacggcaagtgcaccgatcgttccaagtaataaaataggtaagtgagtatcgttctccacagggattggggtgatgttcacagtaatgaagaatcaatgtgattgaaagtaaagaaaacagaaaatgttgaaaagaattgttgtggattgaattggttgtttgagtgtaaaaacagaaattaaagaaaacagcaaatcaaattgagaagttaccaatggacgaataattgtggtcaggcgcaatcccctctgattcctcctctttcacttgactggtttattagtttaatttatacaaatgataaatctctcctaaattcgtaaatcctagataactagcgatttagccctttaattcaatcgagaaccctaatcccttagcgattctgtcaatctaagcatttagataatatatcatatgggtttcttgttataattgttcagagaataagtcttttctagattagttaatccctaatcccttagtgaattaaccctttaacctgaattgaaaacctaattcctaagtgaaatctatcagtttaagcatttaaaagaccatattataatttctgcagccacgcatccctatccctaggtgatgaacaactgttattctaaataagtcagaaattagaaccccaacgtccccattgcgaatcctaaccctagatacttaattgaagtgatcaattccaaataagaatagaaataagtgcagaatagaataaaacaatcaaaacaatattattcaataccagtcaaattacagaagagtccacatcagttcatagccttcccacaatacaagatttagcctgccataggcctcaagaacatcaaagctgttgaataatacatgactgtgctgaaaccctagccttgattcttgatttccagaggtttttgaatgatgtttgcaatgtaaattatgatatggaagtgtatggaagcatcctttcttcagtccagaggcttttcttttatagatagatttaattagagtaacaaagcctaaactgtgctcaaattcgaaacatataaatctaaaacaagcaacaaaatcttcatggcgcgacccgcgcgtgcgatcccgcgctaaccgcgcgaacctttcgaatcaacgacgttgatcgtgtggacctccacgctaatcgtgtgaggtcttcaagctaaatggcctgagattggagttcctggcgctgatggcgcgtctctggcacgatccgcgcggcggcttcaaatgactggcgctgatcgcgttgtaatggtgcgactagcacggggtcttcgagctggcaggttggctttctatcatttggcgctactggcacggattctggcacgactagcgcgacttgttcgagtctgaggtctgttaatttgcaagtggcgcgacccgcgcggtgactggcgctatccgcgcggtgccttgaatcttgttttcttttttcttttgccttgatcctcctctttttgacctgaaagtgctcaaatggtaatgaattgaaattggagacaattaaaatgataaactaactaattctattctaattcctaacttatttaactaaattatatcctaaactagcctaaaactaagatgtgtttgcaacacatcaatagtgatcttgaataacactcaagaacctgctctgataccaattgaaaacaataggaatacccacaataaccaagaggggggtgaattggtttgatcttagtattttaaaaaaaaatatttataaaatcagagttaaaggatctgaatcacttttaaaccaagaatttttttaaacaatcaaatcactcagctcaagaaatcaatagctcaaaatagcacttgttgagtaatgataataatgccaagaacaaatgaataagataactgatagagatgaaggaatagaaaagcaacccaaaaatttatactggttcacttctcaaaagaagctacatccagtttcttctaatcaacactaaattagagttccactatcatcaattctagttctttgaggctttataacaaactctctttatcaaccctagataaagaataaaaatctaaaaccctattagacttctagtgaacaagaaccaaaaaacactactttgttttccctagagaacactactctaggataagcttcaaagaaccattttacaatagcatcaaataacaaacattacaaaaacgaatctacaaccaaagataatggagagaaacaacctaatgatccaatgaatattataacgacttcgtttaatttccttattttagcctatcacgtcattttatattctactgatcacgtttttagtttacgaaaaaaaaaatttcttttttttctacatgatttgatttcgtaaaataatattctaagcgatctactaagttggaataattaatcataacacatagtccaaacatgtttaagtctaacagtccgtgtacagttatccaataataaaatatagaccgtcatcaaaatagtatagtacgaattatataatcccaaaaacaacaacatcgaacgagagcaaccatatatcaagccaaaacacagcacacaattcatccaagcttctccgtatctcagcttttcgcttttcctctactcgcccaaataaattggggtcatcacaggtgtcaaccacagacacaactcgggtaagtatttaataaacatgattagataattgacagaaacagaaacagataaataatcgaaacagaataacaattataacacagatatatgatgaatgatgcatgttttctttattaaatgatgcatgactgagatctcagattgtcaccactggtaccataattaaaacagttccacccactctagtgaaacttccctccactctgagggttacaatcaaagagtttcacccactctagtgaaacttccctccactctgaggggtcaaagggtaccatcataatagtttcactcactctagtgaaacttccctccactctgaggggtcagatgtaaatgatgcatgatttcaatcttttattcaatttttcacctttagtttatttctcaaatttttttttaactttggcaccataatcttcattcatccatcatgttaaattttaatataaagtgcaccattatttttttcagacaaccatcaatatcacagatataagtgcccaccattttcttaagaaaataatcttatatgttataaatctttaatcatgtattcatgacttaattacatcatcaagtgaataatatacagcaaccttaaattacaaatttaatatacatcaccatcataaaatatacagcaacacatacagcaatacaacagcataataaaataacagacaacaacctaataaaataacagacagcagcattagcaacataataacatacagcaacattaatatacagcaacctagatgaataacatacagcaacataaaattacagatacaataatatacagcaacataataaaatgacttacagcaaccttaaataattaattacaacatcaagtaaatagtaaaggaataccgcaaagtaatctatggccacaaagtaaaattaattatattgtacagccacttatttaagtttcaagtttattctttggttaaaggttattctagttcattgagaattttaatcaaacacttaatatgctaaatttttaattttattaaacaaggaaaaacatagctttaatactagagaattaaatgttagattaacctaatcaaccatctaattcatgtttatcaaaatactccccataccttcgcttgtctttttttgaatttaagcttcttttcttcaagattcctaaaccttgttcatgtggacttcaaggtgtgggctgctgtttttgcttttgtattttgagtgaaaaagattgaaaaagagatgctgaattgtggggttgctgttcgtgaagttttttcagcccctactttggtccactttgctttttatatatattaaatcatttggctttgtaaaggaaatatcacaaagctccatcattccttgcctttttagttggtccaataagctttcttcttgcctcccaaccgtccaagtggcttgttccacaaaatttttaaagctttctacctcattccatgtagtgcacagccaagtcttgcttattggagttaatttgtttcaatttttaggctttatggcacaaaccgtagaatacctatatttttaatgctttgttttcttaacatcttatcttatattagtcttaaatatttctatgatttatgaaagctaaattttaattgttttattgaaagtactaatttctaaaattggttaaaaactagattaagttgtagtatgttttagtaatcaattttgagatgtttcttaacttccttttaataattttttctaaatttctattggttcatcttattcttaatttagtaaaataactagacatttatttaaggattcatttatttcatgattaagagaaaaatttctagattgcacctttcctttttttctgtgttttctaaaactcagattagtctgtattctaatttttctgagtttttttttttaaatttctaaaaattttatttcatagttttctttattaaaaatgtcactaatttcctatttaggagcatactagatttttgtcaagcttctataactttactgaggctgtctgaccttaccagagaaaaaaggatattttggtcatttgtacaaatgtttagggcattttagtcttttatcctaggtacctatctgtcatttgtggaattgtctaaggacacttatgccatttccaaaagggtccaagggtatttatgtcaatttatttaggaatgcctatttataagaaaatgcacatatatggaaaattgagggtgttacaaatatgaatgcatgtgagttactaatcggagttgaattgtaaaaaagaatttcaaaccaagctctctaaaacttctttaaaatctcttgcccaagaaatcattcatacccatgaggattaaagtgtgtgggacaagaacttaggtaacccagaaaatcactttttaattttgagaaggcttgtgtatattaaaaaaattcgaagtattcaagttaagtttcaagacaagccttcttcctatttataacaactttttgtaacagattataatcgattacacgcgtcaaataatcgattaaaatgacttatgtaatcgattaaattgtcacttaatcgattaaagtgttcaaagctcgattctaggtttcacaacgaacaaaataatcgattaacccgagcagtcatcgattaaatcagagaagttttatttcaaaagcagtttgtgtaatcgattacaatttatggtagtcgattaaagcagttaagcaagctttttcaaaatagcttatgtaattgattacgattaatggtaattgattaaaacagcaatgcacaacattcatttttcactatgtaatcgattacaagagttgtgtaattgattaatatgttcatcaaagcttttccagttttaaacacaaaccaaataatcaattaaaccgttgtgtaatcgattaaaatagtaggattacattttttcaaaaccattactcaattaattcctttttcaaagtgtgagtagctttgatattttaatgaaaacatttaagcatgttaatgattatgtgcatgcaatgcaaggatcaaaagattgacctctcattgttaagactctcggcaagcgtatcgatttgtcgttgtaagttacaaaattttataagatcgtctccacaggaacttgagcttactcagttaatccaattataacttaacagttcaatagttatgtacaagtaggttatagcggaatttcatttgtttaagaaagtaacggaagataactaaacttagcaaaaatgaaatataattatgagaaagtgggattggatttcaccattcttatccttttatatccaattaatattaccatacataaatcaccatctatccttattgatgcacactattttaccctgaatcgatccctcgcattcaagttctaaggatatctaccgaatatcaagtcctcgcatatgaagtaagtaccccagcattaagaattataatcgcatgttaaatgccatcaaaacgttatgccctattcctagcaacgtaacttaatgagtaaaatcattcggttcaaaccctaagattactttcctatctcacttagagttaaattcatgaaactattgatcaagtagaatcaagcattacagacagaatggaattaccaataaggaatagaaaggattcatgcgcaaataaatattaaaagagatgcatagggttaagaagattacatccaatcctcaaagaagctagctactcatagtggagtgaacctcctcacaggaagaattgatgaagggccccatcactgcttctttccggtagagtctctaatcctctcttctctcactttcctaatctacctactactagtatttaagctcctaatgttatcatcttgggacttgaagctcgcctgggtgagccaaatgcactggagttggtcgcctgggagagttaatatcttaatgttgaagaattctcttgggcttggatagaatttaggcctgattgcttgtaacacctcccatgtttgctttttaagccctttttgcttgctttgcttgttcggaagcttcggaactttggaatctaacaaaatacaaaatatgattggattaatcttctgaaatatgaaaaacaacatttatctaagtagtagatacaaatcaactaggtttaaggcaaatttatagacaaagttaatgaaatcaaaagataagtgtcagcatttgaaatatgattttaactgaaatatgacacttatcactcatacacttcatttgaattacaatcttcaaggcatgtgaaaagctcaaaactttcttctaaatcataagtttcattcttcttgttgctctccctatatccaacacatacaacactttatcatcagtggaatagttcaaacattgaatctaaggcctgttgatttgcaggtggcgtgatccgcgcggggctttgaatcttgttttcttctttctatggccttgattctcctcttttaaatctgaaactgttcaaatggtaatgaattgaattgaaagcagataaaatgataaactaactaatttctaatctattttcctaattatttaaccaaattatatcctaagctaacctaaaactaggatgtgtttgcaacacatcacttgcatatgtatgtctcatggatttcaaactttttcaaatggatgttaaaagtgcatttttgaatggatacattgaggaggacatatatgttgaacaacctcctggttttactgatttcaaacatccaaactatgtttacaaacttaaaaaggcactttatggtttgaaacaagctcctagacaatggtatgaaaggttaagcaaatttctgcttgaacaatctttcacaaggggcaatgttgataaaaccttgtttatcaaaaggcagggcaatgatttcttattagttcaaatttatgttgatgatattatttttggttcaactaatcaaaaactttataaagaattttctgcagctatgcaaaatgaatttgagatgtctatgatgggagaattaacattctttctaggacttcaagttaaacaaatgaagaatggaacttttctcaatcaatccaagtattgccttgaagtaatcaagaagtttgaaatggaaaaaagcaaagatgtcgcaactcctatggcaacctcaacttatttgactctgatgaaaaaggaaagaaagttgatgaatccaagtatagaggaatgattggctcattactttacttgacagctagtagaccggatatcatgctaagtgtttgcttgtgtgcaagataccaagaaaatccaaaagagtctcaccttacagcagtcaagaggattatcaaatatctcaaggcaacacccaaagttgggctttggtatcccaaaggtgcatctataaacattattggttattcagattctgattttgtaggatgtaaacttgataggaaaagcactagtggaacttgtcacctccttggaagttcacttatttcatggcattgcaagaaacaagcttgtgtagctttatcaactgcagaagctgaatatatttcagctggtagttgctgtgcacaaagtctttggcaaaaatttcaactaaaattttttgaactaaaatttttttacccctatttactcacctctgtttacccctaaaaatttcatgctctttactcacctctgtttacccctatttttttgcattttttgaactaaaatttcaactgcataatttgcaaaaattaggggagttaatggctcaaattggttgcaataaacaaatatatgttgtgaatgaatgctaagttaaaaacagatgtctttaacacttgttcttgcaaaggaatttgaatttttcaggtgttaaaaaagctcagaaaaatggtatgaagactcttcatttaatcacaagacccaatgctattcaatttcaaatttggcatgtttaaagccaaaaagggggatattgttgatttgagggggagttacttgaagcataaagaaatttgaagacaaaggattgttttggactttcaacatgtccttggagcattgaagaaaagcttgtgatcaaatgtaaaaggaaggaagttttctgatgatccaagtcattgtattcatatcattcataagtttaagaattaaatcacaaggcattggtaaattgttttgagtttttgaaataaaataagtgtttttggaaaaatagcatttcatcggtttaattgattaatataggcaaagaattgattgttttgttcttaatgctttctggaaaattctcaagaacattttaatcgattacactatcgaattaatcgattattttgacttagattatacataatctgccttagtaacttttttaatcgattactaccaagttgtaatcgattacatcatccatatagaaaatatcatctctctggtttaatcgattaccaattgttgtaatcaattacatagtacaaacacatatttcatagtgtcgggtttaatcgattacacatcggaataatcgattaaattgctcgttatagttacccagaatcattatgaacattttaatcgattacagaagcgtatgtaatcaattacaagtgctaaacaatcgattacaggagcgcatttaatcgattacaagcggttacaaaaatcattataaatagaacccatgctcagcggatttccagacttgagtaattcgtagtctaagcattaaaaagcattctaaacgttcactaagtgatttttctgggttcattaagttcttgcttccttgaaactcatatgggtcttagggattgagtgcagcaagattttgtcttttcaaagtttaaggaaagccatgttctgagtttgttatttgcattcaacctggtaaattcgttctaatgcatatcatctttggatcatcaagtatttctttccttactctttgagtttgtaattctcttttgaaacttgtatttgcttgtctattgtaaataggtttcttgcatgaaaactagagatagtgtttctctaggggatgctgagtagtgttctcagtttgggtttggtctctaagggtctaatagtgttttagacttctgaactttatctagggttgataaagagaggcttgtattttcttgtaagaatattatttgcaatagtggaactctactctagtgttgagtagaagaaaactggatgtagcttcatagtgtttgaagtgaaccagtataattccttgtgtgtttatctaattctacatatttgattgttttatgtgaattcttgttaactacttgattcttgaagcattacatctcttgggttgatctttggataaaggttcttggttactaaagtaataaagatccaaaaagggaaaaactctgattttgatcaataaatttttaaattaccaagtctaaccaatttcgtccccctcttggttaagtgtgaagtgttcccatattttacaatggtgagtacttaaactgctatacgaattcattccatcactagcaagtgccagcctaagatttcttagctctttgctgaatttcggatacaaacgattaatcttcttccactgggtggaatcagccggatggcggagcattgcatcgtactttctcccatctgcatgccatgtaaggtctttagcgtcatctttgttagcaaacaaacgcttaaacctaggaatgataggaacataccacagcaccttcgctgggggcctttctttgttctttcatcactactataatcgtcattgtccttcactttgtaccgtgataccccacacctggggcatttatgcatttcttcaaattcatttctgtacaatatgcaatcattacggcaggcatgaatattctgatacttcatacccatcagacactatcttttttgcctgatagtaacttcttggcaatgtgttttcatctgaaagcatctcctgaagtacctgaagcagtgaactgaagcttttatcactccacccatatctggccttcacattaactagacttaacaccgccgacaacagtgtcaatgactttttgcaccccggatacaacgacttcttggaatcactttccaatgtatcatacatagggagatgggcttgctcaaaagactcatgtcccagattacgaatcatatcctctaataaatctccgatgtatacatcaagtggtttagtttgcaactccctctacatctctatcaattcaccatgccatatctatgtggtataattcttcttaatcccatcacacaaaagatgttcccgtatgtcgtctactgcttggcgtctcccattcaaacaatttctacacaaacataaatattttccatcctcatcaggtcgactctttcggaagcaaattccaagaaatgttcaacaccttcctgaaactcagcactcatgcaacttgcattcatccaacttcgatccatataattgataactatgtgatactcaaaattattccatgccgaaaacctcacttttttcattcaaggtgtggccctatcccattcaggaagaatcatttttttatagtacattcatatgtaaaggttaagtctcttttgttaaatttgacgaaattttggcagcatttcgccttgatctccaagaacacgacatgaaagtggtgaaattaattcgaccacaatcaagtgcacccagagaacaagtgaaatgcatagtaccgaaatttcatcaaatttaagaaaagaaactcaacctatacatatgaatgtactataaaaaaatgactcttcccaaactgtccaaatggacaattcaagaatcaatacaacaattaatccaaactgtctagaagaatcattgtattgaatctcaaatgggaaactaaggttcactcatattgaacataagttctatataaagaaatagtcattaatcacaaaaacaaattctcgaggcaagtcgttagacattcgtacctatgatgatctctgtgatatctccaacaacgaaagtcgtgatgcagatgcaaccaggaaaaggaaaagttcctacaacttacattcaacattgaacattaataacaggaaaaggaaaatcatttgatgaactaacctagtgaacaaaaatccaaatccatttatagacaattatcttaatattttggtaaaaaataaaattgtacctgtgatgatctttgtgaaatctccaacaatgaaagtcgtgatgcagatgcaaacaagaaaaggaaaagtgtctgcaagttacattcaaatgaaaattaaggattcacatattgcatattaattcaaatgaaaattaagggctccccaagctggctgtggaacgcagtgcaagggtggtgttggaagcttagggataagaaataaaaacacatctatctttggtgtgtagcaatttggaggattgtttttgttggagcaataatttgagatataggatcgtatagtatagtagtactactagagcaagattggaatgaatgatggtgtggctactagctataatacccattcattcattccaaagcaaacaatttaataacatatacaagacctttagagaaacgccaagctcgtagcttacaatcttttcatgaaagggagagactcctatgaagttcaaggcctcatgcacatgcatccctctctccctcccatgaaattttaaccacttctcaaagtggagaaggtgggctatagtccctatgatttttcgaaataaagctactcatatactgccacaaacttgtacttgcatatatgtatatggcctatcggtaatcaagagttgtaacattaattaaactataactagagggtagttagctgctttatttatcaacaacacttcattgtcaactcattaaaggggctaggattgttatttgttaatacatactttaagttaattatatttgtcttggcgggtgcaaacataatgtgtcccggtcttacatctcctgcgagtgttttggatgaggatgtaggggcacacaacaaagtcacccctcagcacaatacccttatctgctgttggccaacaccaacaagcatcccatgtgatgacttgaggaagttttctaactggctcacttatccgcaacttttctgcaaaggagaacttcttggtgggtgtgacaataattgctactcatagagagttgcagggagtggcaacaagttttcaaagatcatggatttgataccattcattacgcaaaattaacacaataaggaaatgtcgacaaccttgttggatatttgttgaacccctaaagcataaaacaatttataaagttttgatgataacaaacaatgaatgccacattattagatttattacactaatgataattatttgattacttaatattttgaagtttctgatattttggatttatgaaaatcaatataattgagaagattatttgaagaattttgaagattgatatcattcaagatgacatggaattaagaagatttatttctatttatttttattaaattttatgtaaggagattagaagattgatcttgctaagatatttgccttaagattgcatagcataataagataaaatatttaagattgcattcaaaaataggatagaatatttttaagattgcatttcatagtataataaaatatctttaagattgcattgcataataatataaaatgttttttaagattacattaaaaaataggatagaatatttttaagattgcattgtataatataatagaatatctttaagattgcattgcataatatgatagaatatttttaggattgcattcaaaaattggttaaaatcatatgcttaaattagtataaatagaaacatatttttgtgtttagagtatgcattccattccaaacaatattagaactttagagagtttatgtttgcatcattgagagaattgttgtgagatcatatagaagcgtttgacaagtctgattcttcaactctcgatcaggatttaaaggtacctattttcttaaggaatagaagcgtaaaggtaactattttattgtattcttcttcttgactttggaagaggtcgcaactgggaaactaggataccatttctgtttctgttcttggtgaattgagacgtacgacttctggctgggaaacaaggatgccagctaggataattgttgtgtaaaggtagactaggaaacaagatattaggaactcttgtacgcaaaattatcatagtggagctatccattggattgattatccaatttggacgttgtgattttttacccaattgagttttcatcattaaaattgattatgtcttctttatctcttatctccgtattattgctttgagtttgatttttaaattatgaattattttataaaactcaattcaccccctccccctcttggtcgggtagcactcaaaccttatgttatttttcatgctctacactcaattttgaaagctataggtagaatgttatagctctgaagaaatgttattgtctggttggtagaatgtgaaatataaataattcaatcattgaaaatcatgtctaatgatttttcaaagaagctagtctaccaaaataactagaatttcgttggtccaaattctttatatcaagaatacaacacactttctttcaaaaactaaccatggaagtttaggaaagaagttattttactacccattgaatcaagtagttcgagttctttgttatccttgcctcaacaaaatttcctcattttcttccttcttctaaatccttgagcaactcactaatgccaagagacattgtttatttgtgtgattctaggaaaagaaattatctattcttatataagcgttgtacataatttgaaatttgcttaaccaatatttttttattttatttttattatctttaactagtctaatatattattacactaacatcttttcaaattatatataaaaatataatatattaaaataatctaatctatattttcatttactaaaagatatatttagataatctttatctaaataattagtggattatttgtgggatattacagtcactgcaaccaccaccattatcgtcattgtcgtcaccatcatcaccgttattgtcgtcattgtaaccaccactactattgtcatcatcattatcgtcatcgcaactattgtaaccactgacactatcatcgtcatcgttgtcactacactaaaatcattgtatgcttcatatcatggtgcgcaccaaacattgaaacaaagacatttttttcttaaaaaactgtctttgtatgctgacatacgaagacggttattccgtaaaaaccgtcttcgtaagtgattcataaaaaaaacaaaattttttttgaaattgaaacaaaaacgattttttaagaaaaatcgtctttgtatgctgacttacaaagacgattatcccttaaaaactgtcttcgtaagtgttttgaaaaaaaaaaatttaaattgaaacaaaaagggttttttaagaaaaaccgtctttgtatgctgacttacaaagacgattatcccttaaaaactgtcttcgtaagtgttttgaaaaaaaaattaaattgaaacaaagacgatttttaagagaaaaccgtttttgtttcaaaacatacgaagatggttattccttaagaaccatcttcgtaagtgttaaaaaaaagatgcaaagacgattttttagaaccgttgtcgaaaatgatacgcataacaatgacagctcaacaaccatcgtcatatagaataaataaccgatatcgtagacctcgcctatagtagtagttattcttttcctatcatgttcttatcttatttgtatatatatattttatcttatcccatcctaatcaccaaacataccgtaaaggtagagaagataaacagcaaatgaatgtcaaatcttaatgattaaatttcagaagggggcgagtaacatccacaccagtaaaccctatgtagataccaagagagaatgattctaactactccactgaaagaatctttgcccggtcaacgacaccttcacgaaattgcatcatccataaagcaacctaactggtgcgaattggattgctacaatgtcacgcatatacatcatacgatagccacttgctcagtatacgcatgcttttcaaagtaatatacatgatcagttacgcaaaatctattgacacaaaacattcgagcttctgacgtaataccttcgatcaaaatctatttaactttttgagattatcgatcgtattcaaagaaccaattagaattggtctctcaaattaatgtggagtacccgtatcatgttaataatgtcctaacacattggctctgaaaactacctttcaaaagtcatggaaaatttgatatctctggaaaatttagatacttattttgcgagtaaatatgtgcagtttataaagaatgatacttccaccattctaaaataattgttattctaagttattttaaacagataaaaaagtaataaatagataaaaataataatagttttacaaaactgactttatatcatttttaaatcatttataattttttattattcatcattaatattatatagatataaatgagaaaaataatcaatgttacattaaaaatttataataataattattttggaataattttttatacaacaattataataaaatagaaagaatatataattttatcttcttttctatcatgaaaaattaaagtctagatatatttttaggtgactaaaatttcacaaaaacatataacttctatcatgaccaaaccgaattacaatagacagataggacaagacatttgtgaggatgaggaagaatttttttcacgaggccaagaaaggatttgactgaaaaaatattattgagaagggtcatatctatatatttaactcaattgatttacgaatatgtataaattattgtaaattattggtacctgagtttgatttttctagataaaaacaataaagaaccccaacaagtgtgaagtgttgtcacaataagaaacgtaggatattcctagtgtgcgtgaatgatgatagaaaagagtatcataagttttttttttaaaaaaaaatattttatttaatataaatataatttttaattttttattataaatttatgaacctctaagttaaaaaattataaatttatgaaagtttttatggtatgtgagactgttaattaacttttacaaattaagctttattaaaacaagatatttagtttttatatgtaaatatgttttatagtatagttgtctctcctgtcatttaatcttaggtctatgcctgctggttgtcaaaaacaactttaaaaagagtctttcttactatgaaaaatgtaaataaaatataagttacacgatagaacatatgtactaacaaattattgtttattggtgaaaaagaaattattgtttaataacttatgttaagagaggggtaaatcattgtgttgcttgaattaatgtgtaaactagtaataatttagtttgtgaaaaatttgattttagctcctaaatgaataaaatgtgtgataattacgttttgttgttaagttttatgagatcattttgttattaagttgtaatattcaataactaagtgtcattttttggttttagtccctaaaaaattttcacttgtttttcgttctcacaaaattataatatgttatttttatgctcaaagttaggtacaaatatgtctgaacctacgtgtttgatgactatgcacataatggcccaatagccaactgaacgttgacacgtgctaaaacccaaagcatatctctctctaattcgtgacgtcgatgttcaacccgaaattccccttcccctccttcccttgcttggagatcacccactcaaccatgacacccacttggtcatgggagagacaaaccaagtattctccacctcttcaggtgggcttacccaaaaagtaattcagttcctgggagggaagatatctcaccacagaacttcctaagttcttggtaggcaaccttcacctctcacttggtgtccctctctagaaaactctcctcactcttgggaagcaacctatctcaacaacgacattgcccctactcatgggagagacaatccaagtatttaccttcacctcttcaagttacataagcattattttactatagctttttcaggctacactcttatagactctctctaagctactcattgtccatgggttctctttatgacttatttctcagccaaacttaacccacatagttaatttgggatacatacagattacatacaaggagaatgtgtttgaggggattttacaacaaaggaacacccatgtgttagatcttcattaatgttttggttgtacatcactctagttgcttctttttggcgcataaaaagatgattgagggtagaaagaatgtttttcttattatgtagtatgtaagttgtctcctaccttctctttcatgttttgcaactgtcctctatcagtttataggtcccataggccaaactcgttgttatgacaacttagtctttttcttctctcttttcaaaagcttcattcaagtctaaaataccccaagaaaatttttgttggaagtggggcctttagaacaacttcttgcaaaagtttaaagtgtgtcagttgtacttgacttgacaagtctaagttcgttatgaagttttccattctgaagaacaattttgataaacttctaaagttatattagaactgcattttgatgttgctacgaaaggatcaattctaatgttggttccttcttatgaagataacatgatatgacattgtatatagctcatctccatcaatccaaacacttaatcacatcacaaatcattctgaagtagcatactccaacaaaggtaacatgtgaaggttgttgttgttgttgtgttagtgttctgtcctttattcatacttcacaaagtctgtctagttttcattctgatgatgtacactagattttctcaagtacattctcaactttcaagttgtgcatcttcaaatgcaatcagcatttgctttctaatgtgcccctagtgtgtatggcagcatatggaaagtgagatgctatcaacctcaatcttctaatgtgcatgttgtatgtgtggcaacatatgaaagacatggtgttgctttgtatcctattctgatgtcaactccaatcttattctagttagcttcttcaaaatatcattatgatgtcttcattcttatagtcctcaattacaccattctgatttgacttcggtacaactttattctgatgttgtatgttcattgtagcctttgataaatcttctaattaaggccttcttaatgtctttgcaacatattaaggttgagatcttcataggaagcaatgacttcatcaacaaaggacttcttttaaatattttgaagcttctcacttgaaagcataattgaaacatccattttgagcttgttttgaactcaccaaaagaatttatgttttgctctttgtatatctttcattgtatcatttgcatatcttaccttttcctgcatatgatgcaaatggaaggcaactaaatgttcttcttaggaaaatactttggttagatggcatgacatacttgtattccaaacattcatgtgtgagcttgttgtaacacgttgtatttgttactactttttatttctttgaccctttgaatggccaagatggagttcaatgtcttcataagagttgtacataattctatccttgacattcatgcactggtctcatgtcagtttgacaactacaacataagcaatctttatagcattagaaatgtgttatattatgaggacaaaataaaacctttatcttcaagattcgttgtttacaagatctaagccatatcaccttatgacttcttcatgaaagatttagatatttctcttagatttccacaaccactaagatcatctcaaatttacttttgtagcttaagtagtcttcaaattaatgcacacatatcaagttgtctaggcaaattagtgtctacaaattcaagctcaattttgtccatgatttaggttgtttcataccatgacttgttcacgaaagttgaatatctcaagcttttcacagccatcaagaacaactaaatttcatttctataacttcgaatatgatgtccagaatgaactcatccattatgagtgtgttgcaatagtgttgttattcatgattgctcataatagttctatctaaagcaatgttgatgtaggtctaaacccattagacattaatttccctaatctaccttgcaatgaaacccaatcttcaagcttttcaagaacacaagttgtccaaacttcacatgaaacacatagctggttggaagctttaatttacaacaatggaagatggagaaaggttatagataaagatggaagacaccatagagaagctctccaataagtctaagaagaatcatcacaatagcattgagaagtcattgataagagccaagaggttcttgcacaagaataagagagaaactctcacacaaatttcatatttccattaatatgaacaaagttgttacattcaatttttggggcagctcatatagccacgaaattacaaagcaaatgcacatgaaatgacattaaaatgaagctcgtaatgcaaactaaagaagcctaatgcaagctaaatgaagcttgaggtgcaagcttccctatgtgactcttggctgatccaatccgtgccaatggtggagtattttaacttctaagtgcagccaacaagcttacttaggtgcttcacaaattacacacaagtgcacctacacccttcacacaattacactaaaaagcctttttactgtcactacttttgctactaacaagtgctggaatttatggaattaaattgaacttgagacatcaaaatgtagcccttgttatccttgagttggcatgcttcttcatgtttatccaagttagctttgatgtgttctcgaagggcttgagttctagctcttgtcatgggtcctctaaagctcatcaaaggaagctcttcaagttctccttctagacctttagcttgaaatggacctccatcatcccctccttcttgaaaggaacttgaccttaagtttgcttcctcacttgtacctacatcacacaaagaaagatcacaaacattgaaagtagtactcacaccatactcacttggcaactcaagtttatatgcattgttgttgatcgtctctaaaatcttaaaaggtccatttcctctaggttggagcttggatttcctttcttgaggaaatctatccttcctcaaatgaagccaaaccaaatctcattcattattcttgtgcttattggattgcttagcatattgttctatctttctctccacatgtgccttcacttgttcatgcaatttcctaacataagaagctttagacaaagcatcatgattaatcatagaaaaagtgttaggtaatggcaataaatcaagaggagttaaaggattaaagccataaacaatttgaaaaggaaacaaggacgtagtcttgtgaactactttattataagcaaactcaatgtgaggtagacattcatcccatgttctcaaattacccttgatgtaacatctaaggagttgacctaatgtcttgttcaccacctcggttttaccatccatttgtgggtgacaagttgatgaaaacaagagttttgtatcaagcttaccccacaatgtcttccaaaagtggctaaggaactttgtgtctctatcactcacaatatttctcagcaatccatgtagtctcaccacttccttgaaaaagagattggctacttcacaagcatcatcactcttgtgacaatgaatgaagtgtgccatctttgagaacatatcaagaacaacaaatatagaatcctttcccctcttggatcttggtagaccaagtacaaaatccatagaaatatcaacctaaggggagttaggaataggaaaaggtttatataaaccatgaggcattaatctatatttagctttataacaagtaacacattgagaaacaagcttatgcacatcatgcctcatttttggccaaaagaaatgttcatgtaaaatagccaaattttttccacaccaaagtgccccatcaaattgttttcatgagcttccctaatgaaaagttctctgaaagagtttttaggaacatatagtctcttctccttgaacaagaaatcatcatgtctaaaatatccttgatgagtccccttctcacacaaagcaaaaatactagagaagtcatgatcacttgaatacaattcctttatgtgattaaaaccaagcaacttagtttcaagcatagaaatcaaacaatgcctccttgataaggcatccaccactacattcaactttccttgcttgtgtttaatgacataaggaaattgctcaatgaattcaacctacttagcatgtctcttgttgagtttgccttgacttttcaaatatttaagagactcatgatcactatgtatcacaattttcttaggcaaaagataatgttgccaagtttgcaagactctaacaagtgcatactaaaaacaataggaatacccacaataagcaaaaggggggtgaatggtttgatcttagtatttaaaaaaatatttataatatcagagttaaaggatcttaatcacttttaaaccaagaatgtttttaatcaatcaaattactcagctaaagaaatcaatagctcaaaatagaacttgttgagtaatgataataataccaagaacaaatgaataagataattgatagagatgaaggaatagaaaagcaacccaaaaatttatactggttcacttctcaaaagaagctacatccagtttcttctaatcaacactagattagagtcccactatcataaattccagttcttacaagttttataacaaactctctttatcaaccttagataaagaatagaaatctaaaactctattagacttctagtgaacaagaatcagagaacactactctgttcttccctagaaaacactattctagcataagattcaaagaacccttttacaatagcatcaaataacaaacattacaaaaacgaatttacaaccaaagataatggagagaaacaacctgatgatccaatgaatatgaatgcatgtgagttaccaatcagagttgaattgcagaaaaagaatttcaaaccatgctctccaaaacttctttgaaatatcttgcccaagaaatcattcaatacacaggaagattaaagagtgtgacaagaacttagttaacccagaaaatcactttctaactttgagaaggcttgtgtatattaaaaaatttgaagtattcaagttaagtttcatgacaagccttcttcctatttataacagctttttataacagaatgtaatcgattacacgcgccaaaatagctcaaatctccattttgggtttcacaacgaacaaaataatcgattaaccctagcagtaatcgattaaatcagagaagttttatttcagaagcagcttgtgtaatcaattacaatttatggtaatcgattaaagcaattaagcaagctttttcaaaatagcttatgtaatcaattacgattaatggtaatcaattaaaacaataatgcacaacattcatttttcactatgtaatcgattacaagagttgtttaatcgattaatatgttcatcaaagcttttccaattttaaacacaaaccaaataatcaattaaaccattgtgtaatcgattaaaacagtaggattacatttttccaaaaacattcctcaattaattcctttttcacagtgtgagtagctttgatattttaatgaaaacatttaagcatgttaatgattatgtgcatgcaatgcaaggatcaaaagattggcctctcatacacttcatatgaattacaatcttcaaggcatgtgaaaagctcaaaactttcttctaaatcataagcttcattcttcttgttgctccccctatatccaacaatctccccctttttggctttgaacatgccaaatattagattgaccatgtgtttgatttttgaagtactttgagggatgaaaacagaagtcttgaactttgttaacctgaaaacaaatcagcctctttgccaagaacaagtgttaagagatatgcttgcataaacattaatcatttactttcattagtttgctccccctgacttagataacttcgtcggtttttaatttgtaaaaacacaacaaaaaacagagcaaaacagagtttgtttgctctttagatatcaatcaatttttctccccctatttggcttatcaaggacaaaaagatagcatagcaaaataatgagaaggagaaagtaaaatttcattaatggaaagggaaagacagtacattaattagagaaaagaaaaaaaacagagtaaaacaataagaggaaatacaagaaacctaagctaatttatcaaaatcatcaaggagaatcctagcttctatgttttctagcctagatttcatctcttccaaagatgaattagtctcagccctgtgctcatgatgtagggacaataggcatccatattttgaatcataagtgattcaaatggactgtaagatggttgagcagggccttcatcttcagcttcttcttcatttctagcagcagggatttgttggccagccatttgccatccatgaggggtcttgaccatcccaagcttggtaagatgtttccctttgatgaggctattgctggagtttgtgttgtcaacaacctcattaaagacatctatattgaagtgatcaataaacctggaagcaagaacaacatatggaaaaggataattcatcaatcttttggatttaagcataatttcctcaagaatgagaatccaattcatctgaatggaattcttcatgccatacacaatttgtatatcatcatcagtggcttgggcatgattagtggatcttggggtcaagatataggtgattatgtaatgaagaagtctatcttcatgagtcattgggccaatgcttagcctaagcttcatccttatttgagggtcaagaagcatccccttataggtttctaccgtattataacctccagcctcttcttcaaatttcctttcaccttcaaaggaaatgccaacaacagcttcccaaacttcaagagtaatttccatggctactccattaacttgggacagaaatgtgccatccatagaagccttagcacaggtgttgaacaccttcactaattcaaggtaaaaggtacccttcatctcaacaaactttctcaatccctgggtttcaatcattgcagggaattgaaaaccttctctaataaaccagtcaaggtcaaggtgtttgggaggacaaatgagtttggtggcattaaactgaaggtaggtcattttgtctctctcagcaggaaacaaatgatctaatctattcacagcagggttagaggtttcaacactctttcttttagaggatttggatctcttaggtgcagacatagtgaatatgggaggaaaggctacaggacagagtttctggacttagaggaagaaagaaaaacccagtagtacttaagatggtgtgatttctcctttgaacataggttgtatttatagaagattttgggctccaaagttcaaatttgaaatgagtaacagtttatttcggaataacccacaactttaaagcacagaagattcaaatttgaattaggaggcagttgggcagttacaaattccaagaaaatcttgcagattctgcaataactccacgaataattcattatatacttatgtaatcgattaattcataagcaaaattagtttttacagaagttgtaatcgattattttgacaagtaatcaattattacagagagaatttgaatttcaagaaatttttcaatcaatttaatcgattaccattcactgtaatcgattattccagtgaattgaatttttgtaaaagaatttttaggctgagtaatcgattaatccgatggcttaatcgattattccagagaaattcattttctggaattatttcctatgaataataatcgattatcctggttgtgtaatcgattacattagttcaaatttcattcttagccatgtttcaagttcatttaattgattaatacgtgctgatatgcgcctagcatataaggttttcctaagctttttagaacaagaattgagcattaagcatggataattgcctttttgtgttatgaattgatctaatgtgatgaattgctaggaaatcaaccaaaggtgccaaaactaagcaaaaatcagaagaaaagagccaagtctgaagaagctgtggcgccataagcactggaggttgacgccccaagcgccaaatccgtgccagaagcgccacttgttctagaagatggccccaagagcgccagtctcgcgccagaggcaccattcttcctagaactcagctccaggagcaccagattcgtgccaggagcgccaaatcttctgtcagccagcgccttgggcgccacgttcacacctggagcgccattcactctagatgttggtgccaggagtgcaatactcgcgccaagggcgccacaggtcgacaaaagcaacattttaagggcaaaacagagacttcacaggctccactatagatgcttcaaccctcagcattcaatgcacgactttggagggagaaaaacacaaaaatagggttttagaagcttaggtgccttagctaagggttttagggagttgaaggccaagtggggttgcttctccatcttcttctccttgcatctcagctgggtatgccatttccttttgtaacacagccacccattatgaggtttggttagttctttattgtagttagggctaagcactgaatgtaacctcttttgggattgtattggatgttatctttcattaatatcaagttatttcactttatcttgttgaatgcatgtttctatctctctggaaccgatcactctagttaggtattaagagctggggtttacaatagggatattgggctctaagcttggatttgggtaaagtgacaagctttacattaactagggataggagtgtatgcttgcaaccatttaatgcatcatttaatgcttgacctaaccaatatcactaagggattagggtattagagtgggttaaagggttaagaacactacaagagtaggacttagctattattgttgaagatgcatgttgggtaacttgggtttgacgaaggtagtagacaatacatgaacaagggtagggagcatttggtgtggattgccctaactacttaaccacttaaatcattagaattctccatagttgtccatacattcatatttatatttagtctttaatctagcttattctacacacacacacaacaacaaccttattcattttatttgttgaccaacttattgatttaatttataatttaattggtcaaacaatcctcgtgggacgataactctcttatcactttattacttgagtgaccgatgcacttgccgagtacgcaacacgtgctttaatcgattattccagtagcaatatcagaataaatagtatttatgcaacataatttaaattttgaaagaacatgtgatgattgaacaagtaagaagctatttccaatgaataagcacaaggcaagcatgctagcaaatgttagactcatcaaggatacctagcatatttctaagtgtatagaatctatctctagccaaaggtttagtgaatatatcatctaattgatggtgagtatcaatgaagtcaattttgacgttgcctttttggatgtgatctctaaggaattgatgtcttatctcaatgtgtttggtccttgagtgcattattgtattcttggaaatgttgatggcacttgtgttgtcatatagtagaggtatttcttttaattctataccaaaatcttgcaattgttgttttaaccaaagattttgagcacaacaacttccagcagagatatactcagcttcagctgttgataaagcaacacaagattgcttattgcaatgccaagatattagtgagctgcctagtaggtgacaagttccactagtgctttttctatcgaatttgcaccctgcaaagtcagaatcagaatatgctactaaattaagtgatgcacctttagcatatcaatgaccaacttttggtgttgatttgagatatttgaggatccttttgactgcagtgaggtgagattctttggaatttgctagatatcttgcacacaaacacactcaacataatatctggtctactagttgtcaaatacagtaaagatccaatcattcctctaaatcttgactcatcaactttctttcctttttcatctgaatcaagataagttgatattgccattggggttgcagcatctttacttttatccatttcaaactttttgatcacttcaaggcaatacttggtttgatttagaaatgtcccattctttatttgcttcacttgaagtccaagaaagaatgttaattcccccatcattgacatttcaaactcattctgcatagagatggcaaattctttggacaacaattgattagttgaaccaaaaattatatcatcaacatacacttgaactaataagatatcattgttttgccttttgatgaacaaggttttatcaacatgtcctcttgtgaaagattattcaagcaaaaatttgcttaatctctcataccaagaccttagagcttgttttaaaccatagagagctttcttaagtttgaaaacatggtttggatatttaaaatctacaaaaccaggaggttgctccacatagatttcctcctcaatatatccatttaagaaagaacttttaacatccatttgaaaaagtttaaaatccattaaacatgcatatgcaagtaataacctaatggcttccaatcttgcaactggtgcataggtttcctcattcaatgccttcctcttggttgtaaccttttgcaaccaatctagctttgtttttgactatgattccactctcattaagtttgtttctaaaaacccatttagtgccaataggtttgagagaagaaggtctaagaacaagttcccaaacttcatttctcttaaattgattcaattcatcatgcatggcatgcatccaatgttcatcaattaaggcttgatcaatgttcttaggttctatttgtgaaacaaaagccatattacaacagagatttttcaatgatgatctagtagatactccctttgaaacttcaccaatgatattgtcaagagagagatctcttgtagttctccaatcttttggctcttagactggtgttgattgtttagcttcaacaattggttcttctttttctttatccattgaatcattaagctgaatgaactcctccaaaggacctgtatcaaaatcacacttcttttcctctttggagggattagattcatcacaaataacatgtactgattcttccatgcacaaggttcttttattgaaaactctatatgctttgctatgtaatgaatatccaaggaatatggtttcatcagctttagcatcaaattttccatgtgattctttaccagtatttaaaataaatcacttgtagctaaatactcttaaatgagaaatatttggttttctacctttgtatagttcataaggagttttctttaaaataggccttattggtaatctattcaaagtgtagcaaactgtacttacagcatcagcccaaaaatgtttaggcaaatttgtctcattaagaagagttcttgcaccttcttcaagggatctatttttcctctccacaacaccattttgttggagtgttcttggagctgaaaaattgtggttaattccattttcttcacagaatttttcaaaatgttcattttggaattctccaccatgatcacttcttattgagataattttctccctttttcattttgaacaagtttgaccaattttctaagagcattaaaagcatcactcttggatttcaaaaacaaagtccatgtgaacctagagtaatcatcaacaatgacaagcctatagtaattaccccctaaactcatagttctagaaggaccaaacaaatctatgtgaagtaattcaaggggtcttgaagtagaaacaacgtttttactttgaaaagaattttttgtttgtttccccttttgacaagcatcacataatttgtcattttcaaacttgagcgtgggtaagccaatgactaaatcctttttaataagcttgttcatataatgcatgttaatgtgacttgcctttctatgtcatagccaagattcatcaattttatctattaggcaagaagtgttgtgaaagaatgcatgatctatggagagtaaatagatattaccttttctcttacctatatgaatcacctcacaattttgtccatcacataccatgcaacaattgtcattaaatgacactttgaaccctttaacacaaagttggcttatatttaagagattgtgctttaaatcttccacatagagaacatttctgatcatggttttgaaattgtctcctatgtttccttctccaattatcttccctttgttgttgtttccatatgtaacaaattcaccatctttaagagtcaaatttgtgagcattgatatgtcaccagtcatatgtctagaggattcactatcaagataccataatgaagatcttgctcttagacatatttgcaaaattcaaatcaatttatagaggaaggtacccaattgagattgggtccataagggttagctgttctccttttctttggtagccaaatgcattctccatttggcacatagaatttcctagcatagcatttattagatgtgtgacctttcatcatacaatagttacaagttacaattttttatgctctttcaaaataagtcatgcaattaaaccttggttttgagacaactttttgatatttctgttttggattcacaaacttggtttttcataagattttgatccttttttgtaacccaatccagaagtatctctagcatatttttgcacacttagcatttcagccaagttacattttcctttataaagccttttcaagagatcaaccaagtacttattttctaaaagtactaccacatgtttttcaccttgactttttttgaactcatcaaactctttttgtaaatcattgtatttgtcaacattagatgaagaagaagcacatacacatccactcattttgtaacttgaaacaagtttttcattttcttctttctagttacaaatctcagtttgcaattctgcaatttttgtgacatgccatctaagatatccttttagcctattattggattttgaaagcttttgagcctcttcatgcatttcttgaaaagcatcaacaacttgatcaaattcagaaatttacctcagtttcagcacttgaggattaatcatcttcatttattgtggaagtgagacacatttgcttcttccttttcagttgatgattcaaaagttgttgactcattgtcttcccaagctatgtagactctcttaggctttccttctttctttatcttgctttcaccttgtcgctttttcaaaaagatagagcattcagatttaatgtggccaagcttaccacattcaaagcaagtgaaattgttgtcactccttttgttgttattctttgagaactttttattcttgtctcttctcaagagcttgctgaactttttgacagttagattcatgttgtcctcttcatcttcttcacttgagtcttccatctttgaggatgcaactttcaaggctatgcttttttgtttcttttttgcatcttctgcattggttagttgtgacatttcaagttcatacttaagaagcttaccaaaaagtgcagccatggacattttggatagatcttttgattctttgattgttgtcacctttggttgccatggtcttgtgagacacttcaagattttgatgtccaactcttcagcatcaaagatctttccaagaccaagaagatgattaactatgtgagtgaattttgtttgaagccgagatatgatttcagtggtgttcatcttgaacatttcatactcatggattaaggcatgttttcttgatcttcttacttcgtctgtaccttcatgagttatctctagcatttcccacatctccttttaacttttgcagctaacagttctaaagaattcatcagaggaaagtgcataagtaatcatattcttagctttaaaatcatattgaacaactcttttttcagcatctgtcatttcatcccattctttgggaatcatatcattaccaacaatttttataggaataacaagacctttttctatagcattccaagcacctgggtcatttgattgaataaagattttcattctatttttcagaaaactgaagtgctctcttcaaacattggaggatgattgagggaggcaccttccttgaaggtaatttgtgtggtattcattttcttttaaagaaagatagttgttaacgatttaatacgcttcaatacggcaagtgcaccgatcgttccaagtaataaaataggtaagtgagtatcgttctccatagggattggggtgatgttcacagtaatgaagaatcaatgtgattgaaagtaaagaaaatagaaaatgttgaaaagaattgttgtggattgaattggttgtttgagtgtaaaaacagaaattaaagaaaacagcaaatcaaattgagaagttaccaatggacgaataattgtggtcaggcgcaatcccctctgattcctcctctttcacttaactggtttattagtttaatttacacaaatgataaatctctcctaaattcgtaaatcctagataacttgcgatttagccctttaattcaatcgagaaccctaatcccttagcgattctgtcaaactaagcatttagagaatatatcatatgggtttcttgttataattgtttagagaataagtcttttctagattagttaatccctaatcccttagtgaattaaccctttaacttgaattgaaaacctaattccttagtgaaatctatcagtttaagcatttaaaagaccatattataatttctgcagccacgcatccctatccctaggtgatgaacaactgttattctaaacaggtcagaaattagaaccccaacgtccccattacgaatcctaaccctagatacttaattgaagtgatcaattcccaataagaatagaaataagtgtagaatagaataaaacaatcaaaacaatattattcaataccaatcaaattacagaggagtccacatcaattcatagccttcccacaatacaagatttagcctgccataggcctcaagaacatcaaagctgttgaataatacatgactgtgctgaaaacctatccttgattcttgatttccagaggtttttgaatgatgtttgcaatgtaaattatgatatggaagtgtatggaagcatcctttctttaatctagaggcttttcttttatagatagatttaattagagtaacaaagccaaaactgtgctcaaattcgaaacatataaatctaaaacaggcaacaaaatcttcatggcgcgacccgcgcgcgctcctgcgcgaacctttcgaatcaacggcgctgatcgcgtggacctccacgctaatcgcgtgaggtcttcaagctaaatggcctgagattggagttcctggcgctgatggcgcgtctctggcgcgatccgcgcgggggcttcgaatgactggcgctgatcgcattgtaatggcccgactagcgctgatcgcattgtaatggcccgactagcgcggggtcttcgagctggcaggttggctttttatcatttggccctactggcgtggatttcggcacgactagcgcgacttgttcaagtctgaggtctgttaatttgcaagtggcgcgacccgcacggtgactggcgctatccgcgctgtgccttgaatcttgttttcttctttcttttgccttgatcctcctctttttgacctgaaagtgctcaaatggtaatgaattgaaattggagacaattaaaatgataaactaactaattctattctaattcctaacttatttaactaaattatatcctaagctagcctaaaactaagatgtgtttgcaacacatcaaacaattcccagatttgaaagttgatgtccccagcaacggaaagaattcaagactaagcaagaatcaataatcaaacacaaaccacagtttactatcctagaatcatcatgctatgtacgatcaagttcacatcaaagcttccatggcactttcaatgctgtcaattcatgagaattacttgagtattcctcacaaaagttgtgtttaatcactcattcactcaagtgtataaggttatgatgactctcttactcaacaaagtcacagcactaccataagcttgaaaatattctcaacagttgcaattacaacttgatcaaaaggtctttccggcttgtaacatggctgggctaagggtaggaaattctttggataagtagcttaatgagaggctggatccagtcccttaagtccacaacatgcttcttgtcttctttttcaaaacctggtactttatttaacaatttattctaaagtaaaagcggaataataaacttctttttgatttttttttagaacaaaacaatgtaaacataagcaaaataaaaattactgcaacttctcaaattccagcttgatggacttattattttccaacttggttcatgcttgtttaatcccattcttcacaaccaattggattcatttgtatttcttcatctcttgatggacaattccctgcatttctgctgttatggacttatatcagaccttttctagcctcagggggttggtcaaatggacatggctctgatttgggtaattgaaattaaaggctcaggctcaaatgaggtgcaattggaaaacaactgattggtgagtcaatttggccctagtttcagaagaaaaatttagcttaatcatatcaagtcacacctgcatccagagaaacaattcaagttctagagtacaatgaaattggagtctctcagaaagaaaacattaccactgtttggctcaaatccttacaggtgttagaactcaagtcaatctcagctgactgtatttcaagcatcatttcaacttcaacatgcatttcacatatcaataatcaaattctattcatgcatcatgcagtccatgctatgtttcatttcatcaagctttcatcaagaaatccatccattactgtgttcattcactttttgattctgaaaaatttgatgtgctgcttatttttgaaaattttgaaaaattctgttagacgtcatctgttctttgattgtgatttgcgaaataatgcgtaaccattcccagatttatatgttgttgtccccagcaaccacaaataaggtcacaacactttggaaaatttcagcattatttggaaaatcgcattcaactcaaacattgatctaaacagtttttatttgcaaaatataaaccagaactgtgctatatatataagtgcagtagtgtaaatgtgcagaatgtatgaaaaatgtctcatgcagaatctaaaataaaaccaaaaactagaaacaataaaaataaacagaaaataaaactatgtcctgatcactcctctcctgctcctctctctacaatctctgcagcctttaatgtctctggtggtgcaggaatagaaggctctgtagctgctgcatctgatggaatatgaggagtctctgtggctggaggtgtggtctctgctagtgtagtagtgtctacagctgcaactggtggtggtggaatctcgtactcggatgaaggaatgcctaagtgtctgcaaatcaccccaagaatgctggtctgctgagccagctgggacttgacgaactcctggaaggccagatagctgggagaatctgtgtagagctgctcatgcccaggagtggaggaagaagaaggagttgtagctggtggtactggtggtggtgcatctgctggtggctgggctggctggggatcctctggtgcaagtaagtctcgggggctgcgggctgctaactcctcaggtttgagctttaaagctctgagaatttgctcattagatgctgtctccatggcgtccaaataagtcttatgactcataagtgaggagatcgggacatccatgggttcgtcatctgcaatttctacccctgcctggcggcataactgtagagtaagggaagggtgtgccagccaggacttgctgctagagtcctgtatcatgtgaagaatcctatcagagagaaggttagagatgagaaagttaccatcacctctataacgcctctctttactctctcgtgcttggttgattttagataaaatctggtgaccactttgtattaagattagattagtataaatttttcacgaaaattctttttcgctttgcttgccaatttttacgaattgtcttataatataaacgattttccttaccacaaaccatgcaaattaaattccataacacatattagattgttaacagtctaagcacagtccagatacaacacagtcccaaatagtcggttataacataaaatacacacagcttagcttagcatcaaatacagataaacaaaaaccacagacacagtttacataacatccctcagtacattgaatatccagctccttcctcagtgctttccttagtttactgttcctctgctcgcccaaataaattggggtcatcacaggtgtcaaccacagacacaactcgggtaagtactttaataaacagaattagataattgaaagaaatagaataatatattaaacacttaacttatttaaaataaacaacggatatatagaagtctggaacaacatttatcaacagagatacatgatagatgatgcatgctttcttggttacatgatgcatgactgagatctcagaggcctaataaaaaggtaccaaaatcaatatagtttcacccactccagtgaaaccagtcccacccactcagtgagacagtcccacccactccagtgagaccttccctccactccgaggggataaaaaggtaccataaaacagttccacccactccagtggaacagtcccacccactccagtgagacttccctccgctccgagggctaaatgcatatgaacttgcatggcttgcttttattgttatttacttttactatttattactttatttctcagattctcgtatcagatagttctacccactccagtagaacacatatcaaaatagtcccacccactccagtggaacacaaaataaccagcaactcattcttaaatcatctttgttaccgaatctcaacaaagcccatcatcaaataaatattcacatatcacacggataattcaacagcccaattaaatacagcatcttagattcagcaccacaacatgcagccatgcagtcaacaaataatatcttaacagacagcaaaataaaataaagacagaaagcagaataaaataaaaacagacagcagaataaactaaaaacagacagcaacccataatattaaatccagcaacagcacatacaacaacagctacttaataaataacatacagcaatcagcgacctaataaattaaataacaacatacagaattattaaatcatgatacagcagcataataaattatacaacagcagacagcaacatctactatcaatttaaatacagcaacagcatctcctatagcattattaaatcaattctcagcaatggaataattagacatacaacaacattaattttaaaatacagccaagtcatcttatgtccacaaagtaattttacttattttggacagctacttaattattagactaattaggtaatcaaattatagattatttgctatcctagtccattgaggaatttttacaaacacatggtatgccaactttaaattttattaaacaaagatgaacatggctttacttctagaaaattgaatgttaaattaatctaatcaaccatctaattcatgtttactaaactacttcccataccttagtctcttaagctttttggacagccccttgcttctagcttttcctcttgaatttgaataacttaggcttctaaaatggcttaataccttcacgtggacttcctaggtgtttaggcttttggctttgagataagtgaaaaggatggctgaaatggaaggtattggccgtgaaattcaagaggcttggtgtcttgactttttgttttagctttatgtttttagagaatggtaaatgaaaaggagatggctgaagtttaaggtgcagtccgtgaacttagcctccaattttggtcccatcatgctttatatgctatattccttaacctttaaagaaaatatctcaagctcataattgccttagctttttagttggattaatcccattggctaatgctcttccaccacacaaatgtcctttatcttgaattttctccaaccttcttcattcatcttgaggttacacgtgcaaatacttgtcttggagagcaattttctcattttttttctttttttcccgtgaagtggcttcctccaaaacccgttttagtagaatattggttttggattatgtaaccgttagatttccttaaaattttaaaggtatactcctaacttatatatctagcttttgaccgttgggatctttgaaataatgcttagaatttcctccgtgtccaaaggagtcaagaggaagtttttcttaaaaaaatcttcttaagccatcattacaactttccatttggctaatgtttattgtcttaaggaataatatctttcctagtagcttgtttcacacatttcttcctcttccttgttgtgtacgtgtgattttagcttgtagcacactccttttgaccatagaaagtccaagaagttagtgaagattccttttgtcccaaaatatctcctaactttgttcctattggctaatgctttgaatttttactactccttgtctccttgttttattacattcgtgctattctctatatgaaggattctaaattgcttttcttctttaatcacacggtcaaggcttattcttatagtcaattttacacaatttttccttttatgacctgtatctcttaattttattttcctattggtccaatttgcttctaattatgaaaattatcgaactaacttctttagaacacttgttcctttcataattaagagaaaattctctagctcaagttcatacttgtctgataattttctgatatctagggtagtctagattaagcttttttcaacttgtcttccaaaatccctagaaatcacaatttagggtttcttatcatcaatcttgttaataatttgttacctaaaagtattttatctaatgctcaggttctcattaatttctgaagtcatctaggtcagttttaacctaagggtattttggtcttttgccttagggacctatctgtcattcttgcaattgtccaaggatattttggtaatttctcctagtaaatatcttactaaaatatctagggatacattggtcctttccagaattgttcaggacaaaattgtcattttcaccctaggggcataaccgtcatttttgaaattgttcaggggcattcttgtcattttgccttaaatttttctattgtctttcattaacattttactcttagtaattgtctgtaattccctaaatttttggggtgttacaacctctgagtgtgtaaagcagaatcgctctctctacattcacatcagtcatattagtggagggtatgactgtgtaattcacgaactgatgccagaaagctacatcgccaatcaaatcatgcttccgcatcttctctgggatatagtccagcccggatttaggcttccaagcagtgtataaacctgtgatagcccttctgatagtggtggccagctgaggaacttcatccctatacattttggttaatacgtctggctgcatgcggaagaataaatcatggaattcacaaccctcaaatgggtcatactgggtgtccaatagacgctctatagctttgtcatcaaaagaaacctggacacccctcacccaagacatcctggtcctatatacggtgtctggatcaacattcaccaaaaactccttcaatatcatgctggggctaggctctagaaaagtgacaagcctctgccactggcgtctgagaatcactgtcctcaccgggttgtcttctggtagcgtttcccacaaaattttcttctcagagatgatcttcttttgtaggtaccaggaatcaaagcgttcttggcactcagccgtcctaaaacgggcctcatcaaaatctgctactcgggccctctttgtgcctcctgctcctgtggccttcttcttgcccttggctgcttgctcaccctgaaactcagaaaaattcaaatatatgcatgatgaagcaagtgtaattcccagatttgtgttcttcattgggtcagaacagcaacacttaatattaaacacaaagtggtgaatgatccatcatttagcaagtattgatcagttcagttgtaatttcattcatatgaaaaccataggtaccacgaacaacatattccaacatggattatcacttggaattcccagatcaagactgttgagccttacaacattatacttaaacagttcagtatcatcaatgtaaaacaattatagcaccaacatcaggtcaagtaattcacatttcaacacaaaaggatccatgtataatagaaggattaattcagtttgattacaagcatcagatgggattcaacaattctagatttaattcatgacaatactcgaaaaaattcagtcatgttatacaagcaccttctgacaaggaagtaaatggtttcatctggattcagtttgcaccctacaataacaattaaaacagtaccttcattatcgaaattcaaccagagcacccatattattttcaagcagtttaagtttccaatccacttggtgccattgattttatccatacatgggtgcactattcccagatttgagtgcctcacatactcaacaaagcaaaactcaggtgtttcaagcaattcaatacaagacataacaatccctagatttatctaagtacctgtacaaagcttgcttaagaatcttttttggttagcacaattcaatcattcaacagatattagtttgtgaagtttagtgtgtccaccacaattcagtacatttcaaccaattcataatcaaccaaacattcaacttattataacactcaatgcaatacctcgttgacagatcaaggtgacaattttcgatttagtttgatgcagtttacaccactatccacaatttatccaaattcatttccccctataggtgaacacaatttagtcctcgtatgcaactcaattattagctagtaatgtcttaagcattttccaacagattcaatggctcaaaacaagcaaatgcaaggccgaatgtattcaattaattcaaatttctaaccaatgcatttgggccttgttacatcatatcattcaaattattgaagaatctagctcatattctcataagtcatcaagacttgaccacattacaatccaatttctcattcaggaatttgcacaaacacgtaatgggcatcaaagcaatttaattcaataagcctattttgatcatataacattcccatttggacaaaatcaatatccagtaagcaaaaagggcaagcaattcaatttctatcctaaggttttcagaatgtcttatcagaaatgcatgttaaaatattgggcgttgggtttctactgttcctatttgtgccattattcataaccaagcaattaaggttcataattgtaccttgtcaccagccattataaaaattggaagcttttggttgcagcagaagattatagtggagagggaattacagcaaaagagagtgctggtttgagaaaatgagaatgaggaagagtgatttggggcttttaatggtgagcaaggtgagtgagagtggttaatagaggtttgatggtgtgctgaggtgcaggcgagaaagaaggagcagttttggaacagtaatggagtgggcgcgaatgaggggattcaatttaaaaactgattctgcgatgctgcgcgaatcgcatggaggatggcgcagattgcgccatgaagaactggaaggttctttgattcgacttatccgcacgattagcgcggcctctcacgcgaaccgcgtggaacctttaaaattagcagctagggtcgaacaactggcgcagatcgcgccactactcacgttgttcgcgtggtttaatgcagaacaggtcttatggctcgagcaactcgcgctactcgcgcgggattcacgctattcgcatggtcaattcgaggccttggagctggtagcgctatacctggcgtcagtcgcgccactttatgcagaaggagctgctaatacgagcatgtcacgcgattcgcgcgactttcacgcgattagtgtggatggatcgagtggttggcgttgatcgcgccgctcctggcgcgagtcgcgccatgccttctgaacaactatcaatcattctttttatttggtttttaattttattgacttaattaaaacattatctaaattaactctaattaaaacaagtatgatgatggacctaagctatcagagtttaaaataatttgaattcctaattactaatgcatgaacctaactaacttctatggaatatgcagaaggaaaaactacaaaatgataaatttactgctagcaatcctaaacaagaattaaatcactatatacattgccagtgtgctttgtttaacgtcttaagttagacgcttactttcatttaaacttcagtggcattgagtggaacagaagctgaccttctgttcacttctcccccaaaataatgttttaagcaataaccgtttaccttaaaagctcgatcactatccaagggtgagattgccactgtgccatagggataaacttctcgtactaggaatggtccagaccaacgtgatttcaatttacctgggaagagtcgcaggcgagagttatataacaacacttgttggccaggaacaaacttttttggacagatttggttgtcatgccacttctttgtcttttctttgtagattccgagcattctcatacgcagctaacctgaactcatcttactcattcaactgaagcaaccgcttttcattagcttttgttagttcaaaatttaaaaacttggttgcccagatggctttattttcaagttcaatgggaagatggcaagccttaccatagacaagctgaaagggagacatacctataggagttttaaatgcagtcctgtgtgcccagaaagcatcatctagctttttagaccagtcctttcttgatgttccaatagttttctcaagtattcgcttcaattctctgttggaaatctctacctggccacttgtttgagggtgatatggggttgccactttgtgcttgactccatattttgctaacaagctgtcaaattgcttgtggcaaaagtgagttcctccgtcactgatgattgctcttggcaccccaaatctggtgaagatattctttcttaggaatgagaccaccactttggcatcattggtgggtaaagcaactgcctcaacccacttggaaacataatctacagccaccaagatgtattggttggagaatgacttagggaaaggtcccatgaagtcaatgccccatacatcgaacagttcaacttcttggatgttgttgagtggcatctcatctctgcgcgaaacatttcctgtcctttgacagctatcacactgcatcacaaagttcttggaatccttgaataatgttggccagtagtagccacattgcagcactttgtgtgcagtccggtttgctccaaaatgtcctccataattagaggaatgacagtgccacagaatatccggcacgtcactttcagctacgcatctgcggataacattgtcagtgcattgaaaatataagtaagggttatcccagaaataccttctcgcatcatgcaaaaaaaattttctctgctgccaattgagatcttcaggtaaaattccagtaaccttgtagttggccatgcttgcaaaccatggactgatttgtacagcaagtacttgctcatcagggaaagactcattgatttcaatctctggtccatcttgcaagtccttctcctgaatcctagacaagtggtctgcaactttgttctccactccagccttatctcttatttcaaggtcaaattcctgcagtaataacatccaacgcagcaagcgtggttttgcatcttgtttgtgcagcagaaatttaagagctgcatggtcagtataaacaattacttttgaccctactaagtatgatctaaatttatcaagggcataaacaacagctagcatctctttttcagttgtggcataatttacttgtgcctcatttaggattttactagcataataaataacatgcaagcatttttctttccgctgtcctaaaactgcacctactgcataatcactagcatcacatattaattcaaaaggcaaactccaatccggagaattcaaaacaggtgcagtggtgagtttttgctttaaagtgctgaatgcactaagacaagcatcatcaaatgtgaactcagtgtctttctccagcagttggcttagtggctttgagatctttgaaaaatccttgatgaatcttcggtagaaacctgcatgtcctaagaagctgcgaacaccactcacattaataggaggaggcaatttctcaatcaataacaatttagccctatcaacctctattcccatttcagatattttgtgacctagcactatgccttcccttaccatgaaatggcatttttcccaatttaaaactaaatttgtctcttgacatcttttcagaactttggctaaattagctaagcaagaattaaaacaagggccaaaaatagaaaaatcatccataaatacctcaagccctctttctaccatgtcagagaaaattgaaagcatgcatctctggaaggttgcaggtgcattacacaacccaaatggcatctcctgtaagcaaacactccaaatggacatgtaaaggctgtctgctcttgatcctccagcgctactgggatttggttatacccagagtatccgtcaaggaaacaataataatcatgatcagccaagcgttcaagcatttggtccatgaaagggagtggaaaatggtcttttctagttgcatcgttaagccttcggtaatcaacacacattctccagcctgtgatggttcttgagggaatcaagtcattgttgccattttgaatgaccgtcatgcctcctttctttggaacagtttggactggacttgcccaaggtgtgtctgaaattggatatatcatacctgcatccaaaagcttaacaacttcttttcttaccacttctttcattgtgggattgagccttctttgtggcttccttacaggtttaacatcagtttccattagaattttatgagtacaaaaggagggatttatacctttgaggtctgaaatagaccaaccaatagctgacttgtgctccttaagtactttgagcaatttttcttcctcaaaccattccagccctctgttaatgatgcctggataagtttcattctcacctaggaagacatatttcaaatgttctggtagttctttcaattcaaccttaggtgctccggttgggatgtcatcttccttcatctctagttcctctagcaccggttctgctgtattttctgcagctgcagggctggattctgcagcagatattgctgctgcacttgctgtctcctctgctgcatattttcctgcacattctgcatgtatagctgctgctgtttcttcttttgctgcatatttttctgcataatctgctgctgctgttataaccatgcgttttaagccttgtttttggtttttctgaggttccacgcttggggcgtgggggtccacgcctggggcgtgggaaccagctcagaaatgaaattttcactggagagccacgcctggggcgtgggagccacgcctggggcgtgggaggtccacgcttgaggcgtggggtccacgcctggggcgtgggaagcagcccagaagtgaaaatttttctgccagcccacgcttgaggcgtgggagcccacgcttgaggcgtgggagtcgcgcagaggcctataaaaggcccaaaccttcgaaaaaacatggcatttcttcccttcttcttgctccttcgtccagacctccattagaggtgtttccgagcttcctaggacctcagacactagcctaaactcttacccacgacatataattgcgattgaaccgatcagaaagctaaatccttcatccttgtccctgaaaaccccattcataagtgagaaaaggaacctcagaggaaaagctcagagaacttgagcttggcgcagaaccacagcgtgattaggacatagaaactagaggaagttgttctgaggctgttggagtcgccactgaggtaagaaacacaagtttcaccgtttgattttgaatctgaggggtttcatgaatagtgacccacttgagctggggctagaattagcccagggtccagttgagaaacttgtctaggacgatgaatagatgaaggaatagctttcagttttttattctgatgattttggattttggctctgtgtggcctatgtggtctgtgttatggccacttgtactggtcatctgatgtaccagagccttgtatatattgtcttgagcctgggtggcaaatggaatggagcattaggcgaggcttgaaccattccagagactttctatctgaggctgataaggttatgccatgttgatgaggcattgaatcttcagtgattcagattttgatactcagcccagatggaccttgtatggtctgagagaagcctaatgataggctagacttgttctgaaccctaggataggggaattatgctatgtttgagctgtgattgatgcctgtggtctgaatattgatatgagctgtatatgccttgtataggcgttgattctgagattactggtggcgggagccacagagcagggaccagaccacagagtgatattgttccaggtaagttcagtgtccctggggatgattcccatcttgggtgccacaccacactccaggggagtggtgggcatttcataatgcatgcattggtttctgcattcttgtattgatatatgtatgcctctgagctgggtatatgttgagatgtgatatattgtgattgttgagctagatctattattggccaatagatagataagggagatggcaattcctcccaggagatggcaattcctcctacttgatatattgttataggagatggcaattcctcctactttgatacaatgatataggagacggctattcctcctattactgaatgctagcacaggagatggctattcctcctgctctgagatgtgaatataggagatggcaattcctccaatcttgtggcattaatacaggagacaattcctcctgctctattgtgtttgactatgcatatatgttatgttacaatgttgtatgaatcagaggctaggccggtgagccatctgtttgtgttattgttgttgtgcttatgatgttagtgggccagggtggaggagattcctccatggatcctgagcttactgagatatattatctcaccccgtgtggggtttatgtggtttcaggtgaaccattaggacgagaagagcagtctcagggcaagaggcccatcagagactaggctgcctagctgaggagcagcatagagagcttgaaggctccatttttgttttgttttgttttagctctgtataccccttctgagggatgacattcttttgtagcaccgtgtgtggtgtgaacctgtgatgtatatattgtacagaacttggatatatgtatatgagactttccctgagtacatgtgtatgtttatattgttgttactctgcctaaagctttgttatttgtcttattatgttgagtttgataaactggatcagcaggggcgtgatgttatggttctattatgtgtttccatacataatgtatcaagaaaacgatcctatgtttctgctgaactgtatattttatacgctaatttgatattattaatgataacacgtcggaggcctacggggtgttacagctgcagcaatttctgcttgatcctcggtttcagttgcttttaaacctgctgtaatacctacacaaataacattatccaatacatctagcctaaaacaatcatgttcatcagctggatgtttcatggcatcaaatacactgaatacaatagattcatcattcagtcttaactcaagctttccttgctctacatctattaaagccctagcagtggctaggaaagaccttcctaacagcagagggatttcactttcaccctccatgtctaacacaataaaatctgcaggaaatataaatttgtctacctttactaaaacatcctcaatcaccgctgagggtgttctcaaagacctatctgctagttgcaaggacactctagttggtttaagttcagatatgcctagggacttacacatagacaatggcattaaatttatactagcccctaaatcacaaagtgctctccctacattaatgtttcctatggctatagggatgttaaaacttccaggatctttcaatttaggaggaagcttcctttgaattattgcactgcactcctcagtgagtgctatatggtttcacaatcttgcaacttatgcttcttagatagaagttctttcatgaatattgcatagttaggcatattagctaatgcctcagcaaatgggatgttaatatgtagcttcttaaacatgtctaagaagctggcaaattgttgcttctgcaattgttgcttggtctgcactggatatggagacttttcaaagcgagaaaagtcccacttctttggttgtggtgcagaatcttgctcttctaatttttttgcagctttttcttttggttcagctgccgcaattttcttctcagcttccttttcctcaggcctttctggttgatgaagtatcttaccacttctagttgtgatatctttggcatgttcccttgggtttaccactgtatcacttgggaactggccttgtggtctctcagccaattgttttgcaagctggccaatctagttttccaaatttctgatggaagcgtcttggtttgttctgtgagctcttgttttagctatgaattctgctgttgtttttgacagctgcaacactaccttttcaagttcagagggctccttgttgggaataggagggggctgcaagtagttgttagacttgtagtctaggccacctccttggaacttcctttgatagttgtttccagcagaaaaattgttattcctctgataggactgctgctggtatggttgttgctgtctttgatcattccaaatgccatttacctgcacagggtcagcaccaacaagaatagggcaaacattagattcatgctcaccttggcaatactcacagaccacatgtggttggctagctgccacttgggctgcagaaacttgcagtctatcaatcttttcagtcaatttggctagttgttgtgccaaaattttctgctctgcaagcattgcatcattagttggacaactgaattggttctctctttggctgatgtgttatactttcattttcattccgggccaaagaattgataagctcatatgtttcagctgctgttttagaccttatagtcccccctgctgcaacattcacaatcatacgagtgtcaggagtcataccattaaagaatatatgtacctgcttacctacaggcatatcatattgtggacacctcctaatcaattcttggaatctatttcaagcagcaaatagggattctcttccagtttgagtaaaattggtgatttcattcaccaatcggttatatttatccatggaaaagtattcagcaaagaaccttgagactaagtcctcccaagttgagatgctattggatgtttggcggttcagccatctcaatgcatttcccttaacagcaaagggaaataagcttaatctcactgcatcatctgagaccccctggtgtctgctagtgtcacagattttgagaaatctgtcaatgaagtcatatgggtcttcaaagtcctctcctccaaactgactgcgctccaccaatgctatcaatgaagggtttatatcaaagtgattagcctgtataggtggcctcacaatactggagttaggtcttgtgaacataggagccaaaatatcctccattagttcatcttccggtctccgtcttggctgattaggttgttcttcagccattcttcttccgactctaattcaggaagtgaatcaaagtcaaatttttcagcttctctccttctttgtctaactagtccccgtcggattgttctttctatttctgggtcaaattgtaaatcctcagaactaactgaacctcacataaaacttagagaagcgattagtaacaaaaattccaatcacaaaatccgttaaccggtccccggcaacggcgccaaaaacttgttaacgatttaatacgcttcaatacgacaagtgcatcgatcgttccaagtaataaaataggtaagtgagtatcgttctccatagggattggggtgatgttcacagtaatgaagaatcaatgtgattgaaagtaaagaaaatagaaaatgttgaaaagaattgttgtggattgaattggttgtttgagtgtaaaaacagaaattaaagaaaacagcaaatcaaattgagaagttaccaatggacgaataattgtggtcaggcgcaatcctctctgattcctcctctttcacttgactggtttattagtttaatttacacaaatgataaatctctcctaaattcgtaaatcctagataactagcgatttagccctttaattcaatcgagaaccctaatcccttagcgattctgtcaaactaagcatttagataatatatcatatgggtttcttgttataattgttcagagaataagtcttttctagattagttaatccctaatcccttagtgaattaaccctttaacctgaattgaaaacctaattccttagtgaaatctataagtttaagcatttaaaagaccatattataatttctgcagccacgcatccttatccctaggtgatgaacaactgttattctaaacaggtcagaaattagaaccccaacatccccattgcgaatcctaaccctagatacttaattgaagtgatcaattccaaataagaatagaaataagtgcagaatagaataaaacaatcaaaacaatattattcaataccagtcaaattacagaggagtccacatcagtcatagccttcccacaatactagatttagcctgccataggcctcaagaacatcaaagttgttgaataatacatgactgtgctgaaaccctagccttgattcttgatttccagaggtttttgaatgatgtttgcaatgtaaattatgatatggaagtgtatggaagcatcctttcttcagtccagaggcttttcttttatagatagatttaattagagtaacaaagcctaaactgtgctcaaattcgaaacatataaatctaaaacaagcaacaaaatcttcatggtgcgacccgggcgcgacctcgcgctaaccgcgcgaacctttcgaatcaacggtgctgatcgcgtggacctccacgctaatcgcgtgaggtcttcgggctaaatggcctgagattggagttcctggcgctgatggcgtgtctctggcgtgatccgcgcggcgacttcgaatgactagcgctgatcgcgttgtaatggcgtgactagcacggattgttcgagtctgaggtctgttaatttgcaagtggcgcgacccgcgcggtgactagcgttatccatggtgccttgaatcttgttttcttctttcttttgccttgatcctcctctttttgacctgaaagtgctcaaatggtaatgaattgaaattggagacaattaaaatgataaactaactaattctattctaattcctaacttatttaactaaattatatcctaaactagcgtaaaactaagatgtgtttgcaacacataaatagtgatcttgaataacactcaagaatctgctctgataccaattgaaaacaataggaatacccacaataaccaagaggggggtgaattggtttgatcttagtatttaaaaaaaatatttataaaatcagagttaaaggatctgaatcacttttaaaccaagaatttttttaaacaatcaaatcactcagctcaagaaatcaatagctcaaaatagcacttgttgagtaatgataataataccaagaacaaatgaataagataactgatagagatgaaggaatagaaaagcaacccaaaaatttatactagttcacttctcaaaagaagctacatccagtttcttttaatcaacactaaattagagttccactatcatcaattccagttcttagaggctttataacaaactctctttatcaaccctagataaagaataaaaatctaaaaccctattagacttctagtgaacaagaaccaaagaacactactttgttttccctagagaacactactctagcataagcttcaaagaaccattttacaatagcatcaaataacaaacattacaaaaatgaatctacaaccaaagataatggagagaaacaacctgatgatccaatgaatatgaatgcatgtgagttaccaatcagagttgaattgtaaaaaataatttcagaccaagctctccaaaacttctttgaaatctcttgcccaagaaatcattcatacccatgaggattaaagtgtgggacaagaacttagttaacccagaaaatcactttctaattttgagaaggcttgtgtatattaaaaaaattcgaagtattcaagtttcaagacaagccttcttcctatttataacagctttttgtaacagattgtaatcgattacacgcgtcaaataatcgattaaaatgacttatgtaatcgattaaattgtcacttaatcgattaaagtgttcaaagctcgattctaggtttcacaacgaacaaaataatcgattaacccgagcagtaatcgattaaatcaaagaagttttatttcaaaagcagtttatgtaattgattacagtttatggtagtcgattaaagcagttaagcaagctttttcaaaatagcttatgtaatcgattatgattaatggtaatcgattaaaacagcaatgcacaacattcatttttcactatgtaatcgattacaagagttgtgtaattgattaatatgttcatcaaagcttttccagttttaaacacaaaccaaataatcaattaaaccattgtgtaatcgattaaaatagtaggattacattttttcaaaaccattactcagttaattcctttttcaaagtgtgagtagctttgatattttaatgaaaacatttaagcatgttaatgattatgtgcatgcaatgcaaggatcaaaagattgacctctcattgttaagactctcggcaagcgtaccgatttgtcgttgtaagttacaaaatttataagatcgtctccacaggaacttgagcttactcagttaatccaattataacttaacagttcaatagttatgtacaagtaagttatagcggaatttcatttgtttaagaaagtaacagaagataactaaactttgcaaaaatgaaatatagttatgagaaagtgggattggatttcaccattcttatccttttatatccaattaatattaccatacataaatcatcgtctatccttattgatgcacattattttaccccgaatcgatccctcgcattcaagttctaaggatatctaccgaatatcaagtcctcgcatatgaagtaagtaccccagcattaagaattataatcgcatgttaaatgccatcaaaacgttatgccctattcctagcaatgtaacgtaatgagtaaaatcattcggttcaaaccctgagattactttccaatctcacttagagttaaattcatgaaactattgatcaagtagaatcaagcattacggacagaatggaattaccaataaggaatagaaaggattcatgcgcaaataaatattaaaagagatgcatagggttaagaagattacatccaatcctcaaagaagctagctactcatagtggagtgaacctcctcacaggaagaattgatgaagggccccagcactgcttctttcacgctattcatgtggatcattcgagactgagaccttcaatcctgcatctggtgcgatccgcgtggcttctcgtgctatccgcacgggacttaaaatcttgttttcttctttctttttgccttgaactcctcttttggcctgaaaatgctcaaatggtaatgatttgaattaaaagcagtaaagtaataaacttaactaattctaaactactttcctaattgtttaactaaaatataacctaaaactaccctaaaactaggatgtgtttacaacacatcagctctccacctttctttctttatttttcacttgagaaacctccctcctaggcttctctttccagctggaagttgcaaccccattggataattttgaagcttttatgctttagttgttgctctaccctttgagctttgtggatgatatgtgcctagcacatgatgtttccaagcgcaattagatcattaaatgaatcattttatttgataaatagcttccaattagtgtgaatacaacttatgtgcttcaatgaggtattttggtcaagattggatgattagcaggtgaattagcaaggaattatgcagagaagaaggtctggcgcgatcaagcctatgtacaatcgggagtacataggctagttctacattatggcgccatcagcgccagtcctgcacctggagcgccaccgtctctggagtatggcgcctggagcgccatgtccgtgcctggggcgccaacatttctgcagttcagcgcctggagcgccattctaacgcccagagcgccacagtttcgccagccagcgcctggagcgccacaggtcgtagaatctgcataatgaggacaaaacagagatttcactagctactctataaataatgaagcctcagcactaaagaggggcttttggatgaaaatcatcaccaaaggagaagaaagaaggcttgggagctgagctagggtttgggtgtgaggggaagagggttcttcccacttcccttcctcttcttccttgtacatatcatcaagcatgcttctttttgttgtaccaaggccatccatgtctaggtttggctagtttccttttgtagttagggcaaatactctatgtaaatctcatttggaatggattgaatattattattcctttatgctatgttatttcattacactttgcttgaatgtcttcatctcttctctagacttgatcaacctagttgagagctcagagctagggctcacaatagggatattggggctttagtcttgaaacccaatgtggtgacttgttttacatcacctagggatagggatgtaggcttgcaatctttctagtgcatcacttaatgcttaacctaataaatgctactaagggattagggtattgaaaagggttaaagggttaatgtcactaagggattagggcttaattattattgaatgaggatgtatgattgagtagctagtatttgaacaatgtgtagatcttgagggatcttgtacaagaacccattctccatgttggagatctcttcatttcctttattgggagatctagtgaagatcagatcttgagctcaagatctttgctcaagatctagcactaaagatgctcttagtatttattctccaatcaccactctcattcccctcatcttcataatttcctccatgagaggaaacatactcactcaacctcctattgccatgagcctctccatccacactcccaattggatgactccttctttgggtctccctttgtaactcctcaaaccttgcatccattttggtttgtaagtctttcatttgttttgaaatggctttcatcaacctagaggtcttaggtgacaaagcctcatctcctattgagctcatccttcaaaagaaatggttagcaaaaacacaagtatattaggaaattctcaccactctctaagtgtttgtcacttatactcatgtttgcacactttatctaggctctttctttaatgttctctcttgcctttttccactcttgttcctctctataattcttaagtaaaaacttccaatccaatcaagcttctttactatagtgaaataggaaacaattctaggctagactcaagagtccaagaacaagcactactacaaaataggctaacaatgaaggttctaaaccccttacaaagacggttgtaaaactatcgttgcgcgtgtcattgaaaaccatgagattcaacgacgattgtaaaaatcgtcttcgtaagtcctgaaaaatacaatgaacacttatgcaaataaaccaagagggaggtgaattggttttacctcaaagttttaaaatttcctttcaaaaatttataacagtggaacacttcaaaaggattttatctattcaaaaccaattagaaaacaattttcttcaccaatcaaatcactcttgtgctgtaatcaagtttgtatgatgaacaaattctatacttcaagaatttaatgaaatataaactgaaatctaatgcacacaagatttatactggttcacctctcaatcccggaggctacatccagttttcttccaaccaaatcttggttagagttccactataacaaatatctgttctttacaagcttacaaaattatctctcttatcctccctaggtaaaattcaaaatctattccctatagacttttcaaaagatcaagaaccagagatcccctctctgttcttccctctagaaatcctttctagaaaaagctttaaagaatccaaatgttatatgaaatacaacacaattatacaacaaatatcaatcaaacttaagctttaggttcaagaaagataacaccttataatcctcaacaattatagtgatatgaataattcaatcaacctaagattatatgcaacagatgaatacaactctttcttgattgctttctttaagcactagcttgaataaatcttcaatccttgagaataaagactaaaaacacaagtaactcttaatgatactcatcatatttgattatctcactaatctcagccttaggtactcttgagagctttagaatgtgtatttcacaaatcttgcacgagtatctctgtttttctcacttattttaacacagacccaactgttctatttataaaaaaaaaaaaaaaactgctttaactaactataatccattaattcgtcaatgtaatcaattattttaactattgtaatcgattattttaaccatataatcgattaaattgttcatcagaaatctgcaactttgtcacaaatagaataatcgattaaatcatcttgtaatcgattaatccagatgaactcagtttttcaatgcacacatgtaatcgattaagtacccatttaatcgattaacacagaccttgcctaaaacttaacaatgcacatttaatcgattactaacatctggtaatcgattaaaccaaacgaacatgttgtgtacaattatgcagaagcttatgtaatcaattatttcccaagataatctattatcacagaaagtttctgattctgtgtaaagcttatttaatcgattatgaaccagtggcaatcgattaaaatgttcataaggcattttccagaaaacctacacatgcctgtaatcgattattttaccaaagtaatcgattaaagcagtgagaaaatgttttacacaattcctaattgcctttatgaatttctataactttgattattaccacatgattaattcttatcaaatgaatgcatgaattatcagtgactaacgaggattataaagctttatctaatgaatcaagcttaaacacaattacatatgccatcaaattaattgagcatgtaaaatatcaaaactcatttgcttcaatcatctttgaatcatttgctttagcttcttcaattctaacaatctcctccttttttattttgagcatgccaaatactttattaatgaaacatactctttggcttcaatgaagagatgtatgatttgaaaatttctcagcttttcacaaatatcaaacataaagatcaagcataatcataacttgattaataaataaaaacattcaaacattcaaacattcattaggcatttttataataactccccctgagtttcttagattattcaactcatattcaaagcatttcattgttcaatatcaatgtgtcatttcaaatgaatatgatattaagcatttcaaattcacattcattctatcattctactacttacattttcatactttcatttcattcattaactactcccatttcatttcattcatttttcttactaccttactactatcttactactccccctatttggcatgtcaaattcaaaaattgaaattaaagcatacaaatagaaagggaaattgaaaatagttcattaatcatagaatgaacaaattacatcgaccataaaaataaaaactaaaccaaacttaacaaattcaaacacaaaacataacataaaacacagttaaacttagactagaacaaagagatcaatctaagtccctagattcaatctaacaaagagatcaatctaagtccttgggtaccctagtcttaagttcctctaatgaagaattaatttcatttctttgttcatgatgtagtgagaataaagcatccatcttttgtatcattaaagattcaaattaagagtattgaggttcagatggtgcagcttcttcttgttcttctctagcatctccaatttgatttccttcatcatctccctcttctccttcctcttcagccaaaggaactggttggcctgccatttgctagccatatggtgtcttcaccattccaagcttagtgaggtgcttttcctttatttggttgttgcttgcattggtgtgatccatgacttcattggatacatccacttgaaaataatcaatgaatcttgaaactaatacagcataaggaaaggggtaatttaccaatctcttggatttctgcatgatctcttaaagtataaggatccaatttaacttgattccattctttaatccataaacaatttggagttcatcatctgtggcttgtgcatggttgatggatcttggagtgaggatgtaggtgatgatagagtgtaggacctattttcatgtgtcataggtcttgtacttaatcttagcctaagattcatgtgagggtcaatgagcatacctctataggtttccgttctgttgtatcctttagcttcttcgtcaaaccttctttccccatcaaaggagatcccaacaacttcatgccatatttctggagtaatctccatagtcactccattcacttgggtgagaattgttccatgcatagagattttggaacaggaatagaagacttttacaaggtcagggtaaaaattccctttcatttcaacaaattttgttagaccttgttgttctaacatttgagggaattgaaatccttgttcagtaaaccaaccatggttcaagaactttgcaggatagagtaacttggtaacattgaactggagatagttcattttgtcagcctcattggtgaaccaatgatcaagccgattgactacagggtttgaggattgagcttgagcttgagctttgaggttttggccttttttggaggtaagacatgttgagagaataacaggacacgaattttataaataagaaggaaaagaacttacaaagcaagatggtttctgagctagaattttgagacaaagagtagaacattgcaaggcttgaaggtgtgagatttcaagtctctatttataagaaattttgatgtaatgggtagttgaaaattcgaaaatatagttgttgtgacccttaatcactaccattaaggcttagatggtatcaaatcatggtttattgcagttgggcagtttcaaaactgtcagatttttgcagtaaccacttaaataattgattatttcattatttaatcgattatttcatttaaaatttcaattctggaaaaaatgaggtaatcgattaaaatacaaggcaatcgattatttcagcacaggtggcttatagaagcagaagtgtaatcaattataattggagataatcgattaaagcagaatgagacagatttctcagatatacatgactcataatcaattaattcgataaagtaatcaattattccagacttattcaaaatttggagatattctgagatttcatgtaatcgattatttcgtcgatgtaatcgattataccagagtgaacttgattttcagaaactcgagttgtgaatactcgattatttcgatggtttaatcgattacaacagctttgacttattttatagaagcatcagatgagcaaataatcgattaagattttgtgctaatcgattatatcagcttaaaaaaaatcagattttagcagcatctaatgtaacatcccaaaaatttaaatatgttagttagacataaaaagagaaattacaaaaataattaaaggagactgaccatattaccctttcccttgacatgagaattaccatattacccttgaaacaaaaatttcaaaaatgctcttgaggtgaaaattacataaatacccctggatattttggttagatattttaaggtagaaattacaaaaatacccttggatattttggaaaaatacaatcatgaccctagaatgacgaattaccataatacccttgaggctaaaattaccaagacacccttagatattttgtgaaaacttgatgaaattacagaatcctcttagatggcagattatcaaaatacttttgtgacagaaaatcttagaatagaacttctatgaattttataaggtaataactttgaaactttattcaaaagaattcaagcattagaaaaatatgaaaaaatgataagtaggatctgaggaattttctcttaattataggatgaatagacttatttaataaaatggtttagtaattttgattgtcaaaagtagtatggaccaatcagaattaagataagaacagtcttgtaagaaaagtctgagtagtactctgtatagattacttgtgagcaatttttactgaaattgaagtcagtttctggaaaaatctagaattctattattcaatattatctttaggtagaagagttcaaatcaaacttgacttcctactagaaaatgcatgtgtgaagccataatggaattagattttcttcatcatcaaaaatgacatatgtacataaagtaacatgaaaggaagcaatatttctctcctttcctctagtattcacgtgaaagatggagaaccatggagaaacttcatgatttgccaagtggagggacacttggaagaaaaaaagaaagaagcttcaagaccatgacaagtggtgggacacttgcaaaggtcatgacaagtgtaggaacacttgtaatggaagcatcatgacttaggagatttttgtaaatattctattattttccaactactatataaaggggagaagggaggccttaagtggaagtcattctcaagacttcatcctactacaccttcacgtgaatctctctcatctctttcatttcatttcattttcatcctttcctttccaaagcatcaaatattagacaagcctttcattctttcatgaccttaaggtgcagccaaatacttggaggaattggaagcaaacttgtttgaggtaggtgaaagttagtttcattttatcatttgattcttgagataattcgtatggctgtaagctgaattttgaattgttttgaaatttccatatctccctctatacttaaccaaattagatgtttgaccactcattttaaataataggatgtcctctatgttctcctaaaatatgggaccaaactaagtagtgaatcatgcccaaaaattattttagctcaggctgtccgaaactatccacacccaaacaacttctaccatctgttttgaaaatttatttctctctcatttcttattcaaattaggtgtataatatatgtaattaaagatctaaatgtcaactataacgtataaaaatttcagctaaaactatattttgaactgattgaaatcgtgaaaactctaggagatgttagtgtggaattttgagactgctagtagatttgaagttctatttgtaaaatattatatctagagttttataacttcaattgaggcatgtgataccttttttagaaagcttaggaagtttattttaacatactaaaaatgggaatttaatgactattagatgagtatagactatcggaggaaccgaatgtagtaagaaatcttgttgtcatgatgttctttgttatgattttctttgtgatgatgaaatcttgatgttttgtggcataattgtatgacatgagttatgtagctttgcatgtcatgtgcattaagaaatataaaaagataagacctgaagggtgatacggttaagctgagcacgaccttgagggaaagactaaagaaagataatacctgaagggtgatacagttaagctgagcacgaccctaatggtatccaacgggtgatacggttaagccgagcatgaccctgtgggaaagacttattgacccaagagtgatacagttaagctgagaacgaccctatgggaccccaaaagctaatacagttgagctgagcacgaccctgcgggagcaacctaagtctagtaatgagatcattgtctagtttagcgtattaaagaggaaaataacaaaggtaagctatgcattgacatgattgaaaatgatgcttgcattaatgaagtatgagcttatttttaagtgtttgtgaataaaatgaatctacttcgggttatatgtttatgaaattaaaaatcaaccataattgttcacatgtttttcttaataaaccgaagtagttggaatgatgacaatgacactgtatgataagcaaattttcacctactgggaattctttggaattctcactgttttagtagttcccgtgtcattccagataggtaaatcgaaaggaggaactacaaagtgagaacaagttggaagatttcttttaatgttgcagacttgtagtatttcgttatatgcattgtaatatataatcattactattattatagagaatattatttacaagttattactaagttgtagtttatgaaagagaccaaaaagtctctgcaggctcgatataagcgtaattttctaatattgagataagtttttctcaaatcgattttgattaaaaatttacgttaggaaagttaacatcttctagttacgtattatgacctaggcataatatagtaattggaaggatgttacatctaacatgtattcaatttccaattttgagttaatgtctttcacacaatattcaagctagtcatttacagagtaacaagcacaggattgtcaatcaacatatactagattcatctaatataccaagcatgtttcttcaagtaaagaatctatctctatccaaagatttggtaaaaatatcagccaattgattgttactttcaacaaactcaattttgatgttacctttttgcacatgatctatgatgaagtgatgtcttatctctatgtgttttgtcctggaatgcatgattggattcttggagatattaatagcacttgtattatcacatagaagtggtatgtgttgaagttccacaccaaaatcttggatttgcttcaaccaataagctttgagcacaacaacttccagctgatatgtactcagcttcagctatctgcaaggctacacttgattgctttttgcaatgccaagaaattaaagacctctccaatagatgacaagtaccacttgtgctctttctatccaatttgcatcctgcaaaatcagagtcagagtatcctattaagatgattgttgtaccttttggataccaaagccccacttttggtgtagattttagatactttaagatcctttccactgcagtttgatgagactctttaggattggcttgatatctagcacacaagtaaacacttaacataatgttaggtctacttgttgtaagataaagcaatgatcctatcattcctctatatcttgactcataaactattttccctttttcatctgaatctaggtaggtagaagttctcattggtgttgctacagctttgtaattttccatgtcaaacttctttaacatttccatgcaatattttgattggctaaggaaagttccattctttatttgcttaacttgtagtcctgggaagaatctgagctctcccatcatagacatttcaaactctttctgcatacaagctaaaaattctttacacaaagaatgattagtggaaccaaaaataatatcatcaacatagatttgtaccaagagtatgtctttgtctcttcttttgatgaacaaggttttatccacttctcctcttgtgaatgattgatcaagcaagaacttgcttaacctctcataccaagaccttggagcttgtttcaaaccatataaagcttttctcaatctgaacacatggttaggatattgatgatctacaaaaccaggaagttggtcaacatacgtctcttcatcaatataaccattaagaaaagcacttttcacatccatttgaaacaatttaaagttcaacatacatgcatatgcaagaagtaaccttatggcctctaatctagcaactaaagcataagtttcatcataatcaatgtcttcctcttggttgtaaccctttgcaaccaatctagctttgtttcttattatgatgccactttcatccagcttgtttctaaaaccccacttagtgccaataggtgtgtgagtggaaggtctagggacaagttcccaaacattattccttttaaattgatttaactcctcatgcatagcaattaaccaatgttcatctaataaggcttgttcaatattatttggttcaatttgtgatacaaaagccatagtacaacaaagatttcttaaagaagatctagtagttactcccttagatacatcaccaattttgttgtccaatgataaatctcttgtgttcctccaatctttgtgtttaggtatggctgcctcttgattggactctagttgtgcttcatcttcttcttgtttactaacttcaataggctgttgtttttcctcttttgtttctgcatcattatcacttaaaacttcttctaaagaagagttagactcatcacatactatatgtactgattcttcaatacacaaggttctcttgttgaagatcctataggtcttactttgcaaggaatatccaagaaagatggcttcatcagcttttgaatcaaacttgccaagattatctttaccattgtttaaaacaaagcatttacagccaaatgttttaaagtgagagatgtttggtttccttcctttatagatttcataaggggttttcttcaaaataggccttatgagaattctattcaaggtataacaaactgtgctcactgcatcagcctaaaaatgcttagataattttgtttcatttagaagcgtccttgctccttcttcaagtgatttgtttttcctctccataacactgttggatacagggggagctttatcaagtttggaagtctttgattcaagattggttgagctttcaacatgcttaaaagacttgaacaattggaattgaaatattatgtaaaaggaaagctatatgattgatccctgcattcattcattcatacattgaattaactaaatgttttttattaaaatcaaacaaagattttaacatttacataaggttttaattgaattgaaaggtttttggaaaaataagtttttcactgatttaatcgagtacataaaagggttaatcaattattttgttcttcgttcaaatctgaaaaaccttcataaacattttaatcgattacctatcagtttaatcgattattttgcctttgcataggactgaactgctttgttttaatcaattatttagttaaaatcagtttttaagtcttcttggaataatcgattactagaaattataatcgattatatagttcaaactgaaaatcatgtgttcctgacttaatcgattacacagttcactttgaggataaatatttctgcgttaatcgattacagctcgggataatcgattatattgctcttggtgaaaacccagaatgattcttgaacactttaatcgattatattttaatttaatcgattacacactcgtattaatcgattatttggagcgtgtaatcgattacggttagttacaacttctgttataaatagaagtggaagcttggcttgttttgtaacttgatcaattcgtatttctgagtatacacaagctttctaaacacttccaaagtgaatttctgagttctacgagttcttgcttcatctaaaacattcatgggtatttgaataattctttaagcaagaaatctctttcaaaggttaaggaagaagaattctctgagtttgtttttgtctttcaacctgatttgttcattcatttgcatgtcattcactggatcatcagtttgtttctttccttaattcattgattgtaattctgttttcaaattttattgatattggctattataattaggttcttcttgcttgggactagagaagggttctctagcttaaagatcagagtagtgttctctgaatctttctccttagaagtctaatagggttttagatttttgttttttatctagggttgataaagggaggttcttgtaaaagcttgtaagaacaatttataacagtggaactctaattcagtgtgaattagaagaaactggatgtagcttcatgttttgaagtgaaccagtattaattgcttgtgttcttatttctatatctctattctcatcttattcattgatctttaattctttgagttatattcattgttcaacaagttcagttttgatctattgaattcttgggctgagacatttgattaagtaaattgatttcttggttttgaaagtgataaagatcctgaaactctgatttgaatttgttttaaaaaataccaaggttcaaccaattcacccccctcttggttgttgtgaagtattcctattattttcaaacaccattttgttgaggtgttcttggagctaaaaaattgtgattaattccaaaaatcttcacaaaacttttcaaagtgtttattttggaattcaccaccatggtcacttctaattgaaacaatattacagcccttttcattttgaattaatttggctagtttcttaaaagttgtgaatgcttggcttttagatcttataaacaatgtccaagtgtatctagaatagttatctacaataacaagtccatagtaatttcctccaatactcatagttcttgaaggacaaaataagtccatgtgaagcaattcaagaggtctagaagtagaaaccatgttcttactttgaaaagaatttttaatttgctttcctctttgacatgcttcacaaattttatccttctcaaacttaagcttagatagaccaattactaattcctttcttattaacttgttgagatgatgcatgttaatatgagatgttcttctatgccataaccatgtctcatttactttactcattaagcaattagttttatgtatgaatgcatggtcaatggatagaagatagatgttacccttccttttgccaatatgtgcaactttaccagtttttccttcatgtatcaagcaagtctcattgttgaaggtgactttgaaacccttgtcacacaactgactaatgcttagtagattgtgctttagcccttcaacataaagcacatccttgatcttaatggttaagctgtctcctatgttgccttgtccaataattctacctttattgttgtccccataggtaacatatgatctttcttcaagtactacatctgttagcttggatatgtctcctgtcatgtatctatagcatccactatctaggtaccatattgatgattttgctctaagacacatctgcacaaatcaaattaagaagagaagagggtccccaatttaagttgggtccaaagggttgctttctttcttttctcaacccatatgcattctccatttggaacgtaaaatcttctagcaaagcacttatatgatgtatgaccttttaacatacaataattgcaagtaggagatttagatcagttagcaagagaaaatctatgataggcatttgattgattgtgctgcctatggtacttatgttttggaggtacaaacacgagtttaccttgagttttagatccaagtttatatcccaaaccataagtatcacagcatatttttggacacttagcatttcatctaagttacatttgcctttgtaatatttcctaagcaaatcaaccaaataactattttcagtttgcaaaatcatattttctttttctttactcaccttgtactcatcaaattctttctacaattcattgcatttaccaaccttagaactggctaaggagcatgtacatctatttttcttgtaacttgaaagaaaattgtcatgttcttcattcaatttacaaagttcttcttgcagttcagcaagcttggctacatgccatctcatgaaaagcatcaattacattttcaaattcataatttacctcagattttgtacttgatgtttcttcttcttcacaaatggtagatgtaagacataggtgagcttcaacttctttttctgaagaggactcagaacttgtggattcattgtcctcccaagcaatgtaggcttttctaggttttccatccctttttgatcttttctcaacttgtggcttctttgctaatgaggggcatttagactttatgtgtccttgctttccacattcaaagcaagttatggaggaggggttgttgttcttgtaggtgctatcacttcttttcttttgttgtggttgccttctgtttttattcttcctcaaaaacttggtaaacttccttacaatgagattcatattctcatcatcctcattttcacttgaatcatcttcacttcaatctttgaaggtgcagcttttaatgctatactcttataccttttatctgcatcttcaccatgagttaattgagacaattaaagttcatactcaaggagcttaccaaacatagctgccatggacatctttgataaatcctttgattctttgatggttgtgattttaggctgccaatctcttgttaggcatttaaggatcttgatgttcagctcttctacatcaaaagtcttccctagcccaaccaaatgattcactatgtgggtgaatatagtttgaagctgtgagatgttctcatcatctctcatcttgaacatttcatattcatgaatgagagtatgtttccttgatcttctcacatcatctgtaccttcatgcgtaacttcaagtagttcccacatttctttgacgcttttacacctaacagacttgaaaaattcatcgaaagataatgcagaagttatcatattctttgccttgaaatcatattgaaccattttcttttctatttcaaacatttcttcccattcttttggtactgatttgccataaacaactttggtaggaatgaaagggtctttcttaatacaattccaagcacccgagtcattagattggatgaagatttgcatcctatttttccaaaaactaaaatgttctccttcaaacaaaggtggtctattcaatgaggctctctccttgaatgctatttgattagtattcattgtcaaggattttcaaaagatcttgagcaaattacaagaaccaggtcttaatgccaattgaaaaatacaatgaacacttatgcaaataaaccaagagggggggtgaattggttttgtaacatcccaaaatttcagaactaccgttaaatattaaagcaagtcttaggcaaattgatagtctatatttgagttatttgggtgaaatggttaagggaaaagaccatattaccctttccttaaactaggaatgacagaaatgcccttgaggtcaaaatgacgaaaatgcccctggatattttaaaaatgaccaaaataccctttagcctagaaatggtcagattttttgggaaattgaggaaaagacaatatactcctagataacaaattatcaacatggttggtggcagaaaaccataaactataatttctaagaattttggaagatattttgaaaagagctcgatacagactacctcaggcatcaaaaaaccacaggaaaaggatagacacaatctatagcattttctcttaattataagaggaatagattgctttaataagctagtttagtaattttaataattaaaggcaaagatggaccaattagaattaagataaaagtgattttgtaggtaaagtctaactaacactctgaataattttagtggaattgaggatggcttagaaatatattattcttatgttagaaatataaattagattttactaaatactagaaataattttattcaatttcaagataatataataagcaatgaatgaagcaaaaacacaaaaatctttaaatgttggctactacatgtaaaagaaagaaaaattggtgaaacttttcctagaagcctagcattctacgtgcaaatgaagaatcaaggagaaggatgtagaacttggacacttggtgaggagaaaaacaaggattcatatcattggtccacttggaaagttaaacatcatagcttaggaagatattttgcacttcattaatactaaaccaaggaaggaccgaaattgaaggctggctaagggagaagctacgtgcaatttgaaaggaagaataatgtagaagtttcaagacatggccacttgtaaggaggaaaaagactagccaataaaaattaagtgtatggaaagctaagttaagatatttataacaaaaatcaaagaccaacaagcttataaaaaggaggtggaaccgaaacatgggctggttggaggcaaggctacatgcaaacattccacttccatcactttctaatatttcacttccatcattttctaaatagtccattttagttgcctttttgcttaacataaaaccaagcccactagccttaagaaaatcccacgtgaagaactataagcactaggatgaaggctgtccaaaagcttaaggaaagcaagatatagggaagtttatgataagccaagtttgaatattaattacatgagaatccttacttgttttcataagaaactaagctttgcatgctaggtgtttgatgaattgtctcaaagagctcaagatagttactttaatgcttgttcgactaagtaacttagttttagtttaacaaatgattattaaataaataatttgaacttaatttaatggatgaaagttagaagtgaccagaaattagaggaatcaaagttatctaatggaatattttactaaaagttatatgtttggttgaaaatattctatgaatccatgagcatgtatatggtgctagaagtatgttgaagcatgttatcatattgaatttcataaagatttatgtttaagtatagcttaatcagtgaatattttaaatagttgaaaccttagatattataattatatttaagaaaatggttgttttggaaaatagtaaagcttatgtattaaaaagtgttttaccaattcttgagtattacttatgctaagtttaaatatcattttacttattttctattatgaacaaagttgcctaccatatgattgatggttgaaagaagctttacgtgttgtttaaaaagcatatgccatgagttttcaaagatgttgagctttgaggtgtatgagatataagaagaagagtaatgattaataagaaaatatgtgataaaagtaaatcattcatgcattttcatatgcatatgcctggcgggggctagtccgtgaagttgttgtcagatagctagagttgagatcgaacgttcaagggtgaatgaactgggggatagtggctgtggggagatcacctacccatgatgatcacatgtagtgtgggtgtgagtcctattgcaacacggacctatcctaactgatcgatccaattcgcgaggtgttaagctatcttgactatggccatttgatgatgagatgttgagaaaatcatgcatcttataaagaagatgagcatgcatcacttgatgagtacgttgcatatctatgtgttgtgtagatggtgtgatttaatctgtgggtgaatcatgcatgcatattattttataaatgctattataatcatctgtgtgtatattcttttatatatgtttttattcaaactatgtttgtcataaacttaccgtattttgtgtctgtggttgacacctgtgatgacctcaatttaattgagcgagcagaaaaacagtaaagtagcggatgactatgaagagaagatgatgaagatatttttgatgagttgtactagacttagatcagttgtattttgtgttgacatgtatttgggactgtatgatgaactatattttggactgtattgatggactgtatttttattataaataaaccgtggtgaggaagaatcgtttatgctacgaataaattgtaaaatcgaagcaagaagaaagaactttttcatgaaatttataactaaaataattctaatacacagtggaaatgagatttcatctaaaatcaatcgaacatgagaaagtaaaaggaggcgttacaggttttacctcaaagttttaaaatttcctttcaaaaacttataacagcggaagacttcaaaaggatcgtatttattcaaaaccaattagaaaacaatttccttcaccaatcaaatcactcttgtgttgtaaccaagtttgtatgatgaacaaattctatacttcaaaaatttaatgaaatataaactaaaatctaatgcacgcaagatttatattggtttacctctcaaccccggaggctacatccagttttcttccaaccaaatcttggttagaattccactataacaaatatttgtattttacaagcttacaaaatgatctcttttacccttcctaggtaaaattcaaaatctattccctatagacttttcaaaagatcaagaaccagagatccccctctctgtgcttccctttagaaatcctttctagaaaaagctttaaagaatccaaatgttatatggaaatacaacacaattgtacaacaaatatcaatcaaactcaagctttaggttcaagaaagatatcaccttataatcctcaacaattacaatgatataaataattcaatcaacttgagattatatgcaacagatgaatacaactctttctttatttctttctttaagcactagcttgaataaatcttcaatccttgataatcaagactaaaaacacaagtaactcttaatgatactcatcatatttgattatctcactaatctcagccttaggtactcttgagagctttagaatgtgtatttcacaaatcttgcacgagtatctctgtttttctcacttattttaacacagacccagctattctatttataaaaaaaaaaaattgttttaactaactgtaatcgattaattcatcaatgtaatcgattattttaactattgtaatcgattattttaaccagataatcgattaaagtgttcatcagaaatctgcaactttgtcacaacagaataatcgattaaatcatcttgtaatcgattaatccagatgaactcagtttttcaatgcacacatgtaatcgattaagtacccatttaatcgattaacacagaccttgcctaaaacttaacaatgaacatttaattaattactaacatctggtaatcgattaaactagatgaacatgctgtgtaaaattatgcagaagcttatgtaatcgattatttctaaggataatcgattatcgtagaaagtttctaattttgtgtaaagcttatttaatcgattacaaaccagtggtaatcgattaaaatgttcataaggcattttccagaaaacctacacatgcctgtaatcgattattttaccaaagcaatcgattaaagtagtgagaaaatgttttacataattcctaattatctttatgaatttctataactttgattattaccacatgattaattcttatcaaatgaatgtatgaatgcatgaattatcagtgactaatgaggattataaagctttatctaatgaaccaagcttaaacacaattacatatgccatcaaattaattgagcatgtaaaatatcaacactcatttgctttaatcatctttgaatcctaagcttcagcttcttcaattctaacaagtcctgttttttttaacatgctttcgaagacagttattaagtcaaaaccatctttgtttgtttatatacaaagacattgatcctttttttctaacatgcctacgaaagacagtttttaagtaaaaatcgtctttgtttgtttatacgcaaagactattttgccttaaaatcgtcttcgttggtcccttttttttaacgtttttgaatatgatttttaattcaaaactgtctttctttgtttatataaaacagcgattttgccttaaaaccgtgttcgttgatcctattttttttttctaacatgcctatgaagacgaattttaggaaaaaccatcttcgaaagtggtcattctaagatagttctcttaagaaagaaccatcttatattaatgtaattctttttaaaaaaaaaaaagctaaattttaggaatgaccgtcttagaatgttcacatttgaacattctaagacggctttcctaacaaccgttgtaacaccccaaaattttcataactatagttcaatagatatttatgaaagtcttaagttagggaagatttgattatatgggtgaaatatcaattagagatattacgaaaatgtttgggaaaaatgaccatattgcccttaccataaattagaaatgacaaaaatgccattgaaggtaaaaggatgataatgcccttggatatttttgagaattacaaaaatgttcctagatattttagaaagatattaaggtgaaaacttacataaatgcccttggatattttggaaatgacaagaatactcttagataacagattatcaaaatagtttgagacagaaaaccataagtggaattaggtttttcttaagcatccaatggtataaaaggaaggaaatttatattcacatccctaggattaaagttcacgaaaatggtgtagaataggcaagaagattcatgaaagccacttgtagaggtaagccatgtgatgaatacaagtgttaggacacttatatggcatagatgcaaagaaaacaaaaatcttctattgtctcctttggcagaacatgtattatttcaacaatcccaatggtcaaaagttacatatgtgggatagtagtatacctttaaaattttaaggaaatccaacggttaacgaatccataataaatattttactataacgggttttgggaaaaattcaagaatgaagaaaaacacaaaaatctccctaacatctagccattccatgtaaaggagagaaaattagtgaagattgctctccaagccaagctagtgcacgtgtactatcaagaagaatgaagaaatcttgagaaaattcaagaaaagggacacttggttggatgaaaagcaaggacacttgtcattggtccattttggaaagcaaggtcataatgacctaagagatattttcatggcaaggcattcattaacactatataaggaaggtagggaccgaaaattccaagtcccttctcaagccaagtaaacgtgcaaagccttctcttcttgcatccttttcatttttattctttacacattctttttacctttcactttcaagcaaaattaaagaaaaaccctaagtcttgctactttgaaatctcacgtgaactagaagcaattagaagatggaagtcaagttttaagaagaaataacaaggtatgtatggggaggtttatgttaaatatagtgtgttgcttatttaaagtgtttcttctatttttataaagattgtccaccatgtgtttgataaattgtttcaaagaaatgaaatatgtttaagagttgcttgttggaataagtgtttggatctttgtaaagtatgacttatatacaagaagttgttggatttggattatattttcatggttgagtgctttagtaaaagttatgtattattttatgtgttgttgagtgtttctatgaaagcacaccatgtgttcgatgaaatgcttctaagagataaagcttgttaaatgaatgattatttaaagaagtgacttgaactaagattaatgagtgattgcttaagtaacttaaatctttatgtattatgattatctttaagaaaatggttggtttgaattgtaattatataatagaatgttttactaaagtttgtgtttatatattgataaaagtgtactataaatccttgagcatgtctatttaattttatgctagaattatgatcaaagcatattgaactttataaagattcatgttgaaaatttgagcatatgggatattaagtgaagagtaatattaaagagtaaatatgagataaaaagagaatcattcttgcatgtttcatatgcatatgcccggcgggggttaagcagtgctacctcaagaggaggtgtgtcagatagcttaactgagtcgatgcgttcagacaaaaggagtctgagcttggggggtagtggcagtgaggaccacaccaccatgatgatcacatggatggaggtgaccttcctattgcaacactgacctaccctgactgaatggataaattctgtgccacagagggagtggggctatcttgactatggtaccatgtgatgagaatttgagagaatcatgcatcatataaataagatgagaatgcatcgcatgatgaatatgttgtatgattatctgtatgatgtgtatattgtgtggcttgaactatgtttacttgaactatgtttatcataaacttaccctatcttttgtgtctatggttgacacctgcgatgacctcaatttatttgggcgagcagagggacaacatagtgagcagatggactacgtggaagatattgacaaatattttatttggtgatatgtattacgtaataaacttaggaaacggtctgtattttaatattttggactgtacttgagactatattatggattgtattttattttggactttgaaagaatatttggcgacaaagaactcgtttacaatatggatggttagtatcttttgtaagaattattttaagtaagaagaaaagaatttttcgtaaaatttctaactaagggaattctacagcaaatggaaaagaattttcactaaaaagcaataaaatacaatacggtaaaacgaggcgttacaaccgtcttagatcggctttttaaaaaaaaaatatattacatatggcttctataattaagtagcataactgaaatgataaattatagttatatgacaaaattatatattttttattaataataagaaaataaaaaatgtgagaaaaaataaataatgcatgatagatatattaacctgtaccaacggataaatatacaattattaaaaaatattttcataagtataagaaacccatatataccactatcaatgtctatattaatatataagtttttattgcctttagagtgttatctttttcttctttccttactaagtgaatgtgtgagtagaagcatcactcatccaaaaatatgttactaagtcaaggccaataaattaaaagtgtgaagagacattattttgtaacctaacgatgaaagagtgcattataatttcttttcctttagatacataggaaatcctcaaaaagatgttgttgctacaatcctcaaaaagatgttgatgctacaatggaactacgagtttcaggatttcttttcccatttttaatcgatccaaaactcaagaagttcccccataattacaaactacattctctaagttttatcacaagatctactcaaatattttccaaaggattggttcaaacactgtaacaagttaatttcaagcatttatgttgttacaccagctataaaccatttaaaaattacagagtttctggtaaaggcagaacagtgcatcaatcctgcaattagtgtcatctaatcttttaaaacaagttatacaacattgatgcctttcatctgcttatgtaggtaaggtatcagcagtgtatgccatgatgtaacaccccgtaggcctccggtgcgttattattatgatatcagttagcgcttaaaacattcatttaaaacttagcggaagcacaggatcgattttcctgattcattatgtatggaaacccaacatatcacaaacacacacacatacaaaaccatatcatacccctgctgatccagtttatctcatacaatacacatatagacagatttcttattcagataggcagataactgaaaaacatccaatataagctcagtagaatcatataatatacatcaatagttctgttcatcaaatatacatcagccctcacagggtatacagaactatacacgtcatagggtacatacaccccatccctatcaagggaacaaaacagaaacaaagccaaaaagagctcgcaactctccttgctgcttcccagtcagcaacatgtcatctctagggcctcctaccctgcgtctgttcttctctcccagaagaatcacctgaaatcataagccccacacggggtgagatacacatctcagtaagctcagggtccttggaggactttcctccaccctggcccacttccataacacactcatcaggcatacacacaaatggcccaccggcctagcatatcaggtcctcataacaacatatcaagcatccaaacaagtcaagcaatggcgtatcatcatcaacgccaggatgcatcatcatcagcatccatcctcagtgtgataccggaaactcacacccgtgtcatcccattgggtgctacccttagcatggatgcatgtatatggtacctccaagaatagcaggaatcgccatctactattcccttggtctaagggatcatcatcatcccgggatcatcatcacccatgagccaacatactaggaggaaaccatctcctagggaggtccatatctatccgttggccaacagttctaatcacagtcgtagcacagattctcaagcacagatgcacaatcatatcatcatgagaatgcaaactatcaatgcatgcagtatggaataaccaccactcccccggagtgtggtatgcaagccagatgggaaataatccccagggacactgaacttacctggcaaagcctcgccctgcagttctttccctggtctgtggctcccgccaccaacagtatcaagctcacgacctaatcaaggcacatgtaatttcatatcaaaactagccatcaggcatcaacacagaacatatcataatataacataaatcccctatcctaggatataaacaaactcagcccactctggctacacagagacccctaccaggtccctcaggctgaatgttaaacgtctgagtcattccagactccaaatatacaagcatggcctaagctcatcatccttatagccatcaatcatcattggaacggtctaagcctcagcccagacgccattccactagcctctccgactcaaaaccaacataaacaagctctggctcggcttaagaatcacaagtgaccttgtcacaaagccacacatacaagccatagagctcaaaatccaaagttatcaaaaacagaaactgaaagctaatccttcatctattcatcgctctgaacacatctctcaacaggactctgggctaattctagccccatcacaaacgggtcactattcatgaaacccctcagattcaaaatcaaacggagaaacttgtgtttcttacctcagtggcgactctaaaggcgtcaggacagcttcctcgagcttctgtgtcctttatacgccgtgggtcttcgccaatctcaagctctctgagcttttcctctgagaaatcgcttctcactcagaaaagggtttcaagagcggaaaatcaaaggattcaagcttccataggtttctctcacactcaaaggtcgaaaggaggtgtttagactctcaaatagggtcctaaaaagctcggaaactcctctaatagaggtctggacgaaggaggaagaagaaggagagaaaatgccatgattttcgagcttctaggccttttataggcccagacgtgactcctacgcccccagcgtgggctcccacgccccaagcgtgggttggcagacaaaattgcacttatgggctgcttcccacgccccaggcgtggactccacaccccaagcgtgtacctcccacgccccaagcgtgggttcccaagccccaagcgtgggttcccacgccccaagcgtgggttcctacgccccaagcgtgggacttcagaagaaattggttttctgagttgtttcccacgcccctggcgtggacccccacgccccaagcgtggaacctcagaaaagccaaaaataaagctttaaatgcatggttataacattctccctcccttttaaaaattttgtccgcaaaatttaaaagcatacctgttagccaactcaggatacctctgcaacaactcctgctcccgctcccaagttgcttcctcaggcgtcctgccttcccattgtacctttactatgggaatggtcttgttgcgaatctacttctccattttgtccaaaatcctcataggccttgtaggactcgtcagattgtctctgatctggactgtgtcaggctcaaccacgtgcgagggatctgccacatacttcctcagctgggacacgtggaatacatcatgaagtcctgacaactgaggaggcaaagctaacctgtatgccactggtcctatcctctccaaaatctgatatggaccaatgaacctaggtctcagcttcctcacccctaaggttcgtcctacgcctgtcactggagacaacctcagaaacacgtggtcaccctcctcaaaccgcaagggtctatgcttctgatcataatagctcttctgtcgactctgagccttcatcagcttatctttgatcatcttgatctgcttagaggtctcttgaaccatctcaggtccaagtaactgcttctctcctacctctgtccaacacactggagttctgcaccgccgcccatataacgcctcatacggtgccatgcccaagctggcatgaaaactgttattataagaaaactccaccagaggcaggtatctatcccagctagtacattgctccaaggcacaagctctcagcatatcctctagagtctgaatggtcctctccgtctgaccatctgtctgaggatggtaagctgtgctgagtctgagctgggtcccaaaagcatcctgaagtgcaccccagaatcttgaggtgaacttcggatctctatcactgataatactgtcatggactccatgcagcctcataatctccctgacatataactgggccaacttctctgtagtgtagtcagatctcacaggtaagaaatgagcagacttggtcagcttgtccactatcacccagatggaatcacatccactctgagtcctcggtactcccaccacgaaatccatggaaatgttgtcccatttccactcagggatctctaaaggctgaagcaaaccagacggtctctgatgctcaatcttcaccttctgacacactaaacacttagccacatactcggctatgtctctcttcatccctggccaccagaatctcctcttcaagtcatgatacatcttggtggttcctggatgaatgctgaactggcccttatgtgactcagacaggacgacatctctcagctcgcccttaggcaccacaatccgatctcggtacatcaccaagtcatggtcctcccaggaaacatcctgttgaccaatcatggccctcactgcctcatcctgctgctgagcttctcagatcttcctgatcagctcattatccaccttggtcctgctcaactcaagaccctgtgcaccttctgtcactgtcagatgcatatctctaaactgctctataagtttaccatcagagatcatcaagcatgcaacagtcacattcttccggcttaaggcatcagcaaccacattggccttgcctggatggtatctcagctcaaattcatagtccttcaggaactccatccaacgcctttgtctcatattcaactctttctgatcaaagagatatctgagacttttgtggtcgctgaatactatcaacttggcaccatacaaatagtgccgccatatcttcagagcaaacaccacagctgccaactctaggtcatgcgtaggataagactcttcatgaggttttagttgcctagaagcataggcaaccttctgatcctgcatcagtacacacccaagtccccgcttggatgcatcacaatatacctcaaagactccctcagggtcaggaagagtcaacaccagagttgtggtcaaccgctccttcagctcaagaaaacattgctcgcactcatgggtccaaacaaaaggaaccccctttcgtgtgagtcgagtcaggggtaccaccaactgagaaaacccctggatgaacctcctgtaatagccagccaatcccaggaaactccggatctcagacacgtccttgggcctctcccaggacatcactgcctctatcttgctgggtgttgcgcgattacgcgaatgcgtttacggcaagtgcaccgatcgtttaacaagtaataaaagggtaagtaaagtatcgtctccacagggattagaaagatttctcaataattataaaagttatgattgaacgagaacagtagaatacgcaagagtttgttggatgattgtgttgaattaagtaaagaaattaaacgaaacagtaaattaaatcgaaaagattaccaatgagaagtgattgtggtcaggcacaatcccttataagcgttacctccttcaattgactgatgatttcatctttaagtttacataagacaagtctctcctaaatttgtcaatcctagactcttaagagcattaactagcgatttcaccctttaattcgatcgagaaccctaaccttctagcgattctgtcaaactaagaagtcaaagaacaaatcttatgggttcgtgttatgtttattcggagaataagtctttcctattttagctaatccctaatgtcttagtgaattaaccttttgaactgatttcataacctaatgtcttagtgaaactagtcaattcaagaaatcaaagaacatattatacctccgcactcacgcatccctatgtctaggtgaagaacaagtgttaatcttaacaagtctgatattataattccaacgtgtccattgcgaattataactctctatacctattcagagtgatcaattctaaaccagattatgattaagcacagaaaagaaataaaacaacataacatatgcattaataccagtcaatttacagagggaaactcataagttcatggcctttccacaacaaggagattagctagccataggcctcaagaacaccaaagcgattggatgaaacatgattctgcgaagttggctttaatcttgattcctagggtttgctttcaaagacttgatttatggaagtgtctagttgtatttctaggtctcctttctgctgtagtgcgtaattctcctaaaagctcagaaaacacccttatttatcgagtgttttaattacagtaacttatcctaagccttggtctattttccaaactatatctgtttaattcaggcaagaaatcagtgtcacgcgactcgcgcgcgacatcacgcgactcgcgtgacatggcagtgttgaatggcgcgatacgcgtgatatatgaagtggctcgcgtgactttccagagctgaattgcttattccttcaagtactcacgcgagtcgcgtgagtttccaagtaggtcgcgtggtacattctggacctccaagtgagtcgcgtgaggttggcgcgatgcgcgtgaggtggcagttcttgttttctcctttatttgctcttaatctctcttgttttggcctgcaaacacttgattggtattaaaatgctttataaaacataatatactaaatatatctaattattatactattttctaactatttattctaaatatgacttaaactaatgctatatttaggatgtgtttgcaacacatcactgggatccacagatacaccagttgttgagatcacatggccaaggaacttcacctcagacaaccagaactcacacttggccagcttagcatacaactgcttgtccctcaagatctaaaggactgtcctgagatgctcggtgtaacaccccgatattttatttagttaaggatggatttaaggaaatatttaaggatgcttaggaaactataattcactatatagagagatatttagcacttaacacacattttaaaataaaattcaatttgaaccattttagttattagaaaattctataaaagtgctaaacataaccttaaaagttttcttgcaattataaggtaaagaaattaatttactaaggtggattagtaaggttataaattaaatcactgagtgaatacaattaggctattaaagggaaccaaaagtatggagggtagagcatggtggtccgtgggttaacaaatcatataccaaagctaaactagacaccaatttaaatcaattgggacaaaggaccaagcctaggacatttaaacatagccacggtggggaaaagaaaacaaaacgaaacatgcattattggagactaagttggctacggtcaagggaggaaaggaaagaaaaatctgaatggatgatttcatgagtgaggcacgtgtagtagtcaagaaaaaaaaaaaagattaagtgggccaattcaaaggaaacaatcaaatggcaagtcaagcatggtgcagattttttatggacaaaaggaatatgcattaatggcacaacttaaaagtcacatgggtctatctctaagtctactatccgtacagatcaaagaagcaaagatgaatttggactccttcaactaaagctaaccgtgcaagatttgggaagaagacaaaaaggaataagccacactatcaaagtatattctttaggaagaaaaaaatctgctgggaagaccacgtaaactgcagattttttggccaataatacaagattccaaccaataggattaaagccaacatggaatcatactatataaggcaaggagggaagaaattggggacagccaaggaggaaaataatcgtgcagccccaccacttgaaaagttgttttcaaagcttaattgaagtctcacacaaaccacttcactatatttacttattccactaagctatcattttcaccaaaattctctaaggaagcaacaaggatacgtgaagctttgggagcaaagagcagctggtcccaatttgacaaacatttgaggtatagggaaagctttgataaatgaaatttaaatgcttaaccacatataaaaccaatacttctattagtgagaaattaaattaatgagtaataggagaaaacttagctaaattcaacttttaatttgatgtttgatgttctaaaattttggtttatttagatttagtgatgctatatatggtttggtaatatctcttgaattttctataactattgtgttgtctaattgtatttgagtaattcttgctatggtgatgtggtttagtaattcttcactttctttccttatttcaattgatttggtttcttttaattatcaagaatacatcttaatttggaagtaactaattagaagcattaattatgtgagaaattaaaactacgtatgcttgaaataatttgaatatgaaaatgggataatacatatttggtggtaacaattaattctttgttataaagctgtattttctgtggtgttaagatgaggttatgatgatgacttatgaggttgtgataagtctgggataaaggccctgtaagaatgacgttgtgatattatgatgaaaataaaagaataatttataagatgaaaatgaatcattcatgcatttcatgtgcatctacccggtggggtagaatttgatgatgatgatgaggcgttactcatgaagaagtgatcctcgtaaagaggtgtatgcgtcagataactaaactgagtccatataacttgggggtagaaacagtgaggaccacaccaccatgatgatcacatggatgggagtgataatcctatgcgccactgagctaccctgactggatggataagttcgttccactaaggtgagggtggggttatctgacagtggccacaattatttagatgttgctgagatctcagtcatgcatcatataataaagatgagcatgcattttcctgtatgattgaaagtggaaaagaaattattctaaaaagaggtgaaagaaaaaaaaatatatatatagtaagaataattataatacaagttctgtattctattttgtttaaatacgcattctatattttatttattacgtattccaaattctatttagcacgtattctgtactttatttattaaacacgtattctggattttaattagataatacgtattttgtaatttatttaattcgtatataagtctaattctctgtatttggtgttgtgattgtatttaaattttatttatcatgacttaccctattttgtgtcttgtggttgacacctgtgatgaccccgattatttgggcgagcagaggaacagtgaaatggaagtggtacaagaagatgtggtgacggctgttatgataactttctgtttgcatgttttctactatgttctgtattatggactgtatggactatttggactgtatggactgtctgaactgtttaagcatcaaaactggtaatgatgttgtatggcaagtatgtatgagtaatttaaaattacgttatttagataacgcgttaacattgaaaaatcatttttaaatatttttacgattctttatcacttccacaattaacaaagaaaataattgaatttttactattcttgttttattgaaaaaaaaaaaaactagaagttttataaaataaatacgaatcaaagtaaaatcaaagcggtcgttacaattgtggtatcagagcctggtttgttttaaggacaaaagatggatttttttgatgttgataaaggtatgaaaagttttgttgaataaacgtgtatgttgggtgatttacatgaaaatatttttgatatgtgattaatacttaaatttcctgttattctccttttgttggaattatttaggaagatggaaacttttggcacccataatatgctttttgtgttggtggagagtcagagctaccaagaggaagtggtggatgaacaatccactatctgtaggaaagtagcgatataccgagctgaatctgccataagggagcctccgattaccaaggaatattatgataccgttgtgataccttggactccggataggctagtacatcgagtaatagaaaatgtggtgtattatggaactgataaacctgataatgctccggtgatccgtaccgaggggtattatgataattctcctgaggtggtaggacaagagaatgaggtggcagtggaagttatggatcaaaacttctaaaaataagatataaatatatatatgtaggaactaaataaatggggtatggatgtatgaaaatggatcgtctagaggtacccattaggaaatcaaaaactgtgggaaggtagtgatgttttgagtattttgtgtaatgtaatgtatggtaatgacgcagtaatactatctatgttatggttatgattacggtatttctaatttttttaatttgttgttgtatttatacaagtataaatggcggggagaaatgaccgtgctatagctgacgcgttgcaagctctagctcaagcagtgggaaatcagcaaagggctggaaatgtagaatatcaaggattggagggttttcaacgaaatcatccgcccactttcaagggaggatatgacccggatggagctcaattgtggttaagggaaattgagaaaattttccgagtaatggcttgtcctgctgataaaaaggtactttttggtacctacatgttagcagaggaagctgaatattggtgggagaatgctcagttgcgattggaaacagaaaatcaaccaatcacttgggaggttttcaaaacagcctttttggaaaagtactttcctgaagatatcaggaataagaaggaaatggaatttcttgagttgaagcaagggaatagaacagtggctgagtatgcagtgaaatttgaggaattggtcagatattttcctcattatcaaggagttgaaggggaaggttcgaagtgtgttaagtttttgaacggattacgaccagaaattaaacaagcagtaaattatcagggaatacgacaatttcctcagctggtaaatatgtgcagaatttatgatgaagattctcgtgcccgagcatctcattataagaatgtaggacctatgaggaataaaggaaagaatcgtcccaacatggggaaaccctacaacagagatcgttcgtatgttcctccggtgcgagttccagtaggtcaaagttctacatctacttctccgcgatgctttaggtgcgggaaggttggacactattcctcgcaatgccccgataaggaaccgacatgctatatatgccacaagaaaggacatgtttccataaattgtcctctgaatcccttgaatctcaggaagaaggagaacggaaatcaaggtcatcccccagaaaaaccgaaaaccactggaagagtatttgctctcaatggaagtgagacttctcaatctcaagacctgattcgaggtaagtgtttcataagaaaaattcctttagacgtattgtttgattccggagctactcattcatttatttcttatacctgtgttcaaactttatctcttcctgtgtctcctttgaatttctttttgaaggttactacccctacgagtgagtcagttgttacttctgaaatatgtctaaattgtccaatagagttagagggtcatgtgttttctgttgatttgatttgtttgccactacaacaaatcgatgttataataggaatggactggttatcctctcaccatgttttgttgaactgttttgataaaactatattttttgggaatcctccagctagtagggatatgcagattatctcccctaataaagtccttaggatgatggaaaagaatgatgttcaaatatacatgattaaatctcactctgaatctgaacctgagattgataaagagagtatgcctgtagtgaaagaatttcctgaagtgtttcaagaagtagatcgtttacctcctgaaagggaagttgagttttctatagatttaatccctggaactggacccatatctatagcaccttataggatgtctcctgtagagttggctgaagtgaagaagcaaatagaagagttgttgagtaaacaatttgtgagacctagtgtgtcaccatggggtgctcctgtgttattagttaagaaaaaggatgggtctatgaggatgtgtatagattataggcagttaaataaggtgacaattaagaataaatatcctttaccaaggattgatgatcttatggatcaattagtaggagcgtgtgtttttagtaaaattgatcttagatcaggatatcatcagattcgggtaaaaactgaggatattcctaaaactgcttttagtacccgatatggtcactatgagtatttagttatgccttttggtgtgaccaatgctccagctgtatttatggattacatgaatagagttttccatccctatcttgataaatttgtggttgtgttcattgatgatattttagtgtattctaggactaaggaagaacatgccgagcatttgagaattgttttgcagactctaaaggatcggcaactgtatgctaaactgtcaaagtgtgatttttggttagaaaaggtgaatttcttaggtcatgaaatagctcagggaggaatttcagtagatccttcaaaggtacgagctgtgatggaatgggagagacctaagacagtcacagaaattaaaagtttcttaggtttggcagggtattatcgaaggtttatacaagatttctctaagatagctttgccaatgactactttgactaggaaagatcaagcttttgtgtggaacgcgcaatgtgaggaaagtttccagactcttaagaataagttgactacggcacctgtgctggtgttacccgatttagggaaaccttttgtggtatattgtgacgcatctaaaatggggttaggaggagttttaatgcaggatgggagagtagtagcctatgcgtctaggcaattaaaaactcatgaaagaaattatcccacccatgatttggaactggcagctgtagtatttgcattgaaagtatggagacattatctgtatggttcacattttgaggtttttagtgatcataagagtttgaagtatttgtttagtcaaaaagagttgaatatgaggcagagaaggtggatggaatttttgaaggattatgattttgaacttaactatcatccaggaaaagccaatgtggtggctgatgccttaagcagaaaatctttaatgatatccaccttgatgattaaggaaatgggattgttagaacaatttagggatttaagtttgatgtgtgaaactacacctgtaagtattaagttgggagctttacaagtaactaatgattttttgaaggaagtaggacataagcaaagatctgacccttttttgaggaatatatttgaaaatatagaaaaaggaggaaaaagcgaatttcagataggaaaagatgaggtgttacggttacgagggagagtgtgtatacccaatgatattgaccttaagaaattaattttggaagaaggacataaaagtaagttgagtattcatcctggagctactaaaatgtatcaagatttaaaagttttgttctggtggcccaagatgaagagagaaatcaatgagtatgtgtattcatgtttagtttgtcagaaagccaaaatagaacatcagaagccatctggaatgctgcaacctttagagattccccaatggaaatgggacagtatagctatggattttgttacatctttacctaagagttcaaaaggatttgattctatttgggtgattgtagataggttaacaaaatctgctcattttattcctattaaccttaggtattctttagagaaattgacaagtctgtacataaaggaaattgtgagattacatggagtaccttctagtattatatctgatagagaccctaggtttacttcgagattttggggtagtttgcatcaagcactaggaactaaattaaagttaagttcaacatatcatccccagactgatggacaatctgaaagaacaattcagtctttagaagacctgttgagagcttgtgttttagaacataaaggtaactgggaagactttttgcctctaatagaatttacgtataataatagttttcattcctcgattggaatggcaccatatgaggcgttgtatggtaggaagtgtagaactcctttgtgttgggtagaacctggggaaaacttaattttgggacccgagattatacaacaaaccactgataaaattaagttgattcaggaaaagatgagaaccgctcagagcaggcagaaaaattatcatgatcagaaaaggaaagatttagagtttgaggaaggagatcatgtgtttctaaaagtaaatccttggactggggtggggagagctctgaaatcccgaaaacttacaccgcgttttattggaccttttcaaattctcaaaagagtcggacctgtagcttatcaaattgctttacccccaaatctttccaatcttcataatgtgttccacgtgtctcaacttcgtaaatatatccatgatccttcgcatgtcattgaggtagatgaaatacctataaaggacaatttgacttatgaaacctttccggtaaggattgaggatagaagaatcaaagtcttgagagggaaagaaattccactggttaaggtaatttggggaaacggtgccaacggtgatgccacatgggaagtggaaagcgagatgcaaaagaattatccggcactcttcgcatcaggtaaatttcgaggacgaaattttttttaagagggggagaattgtaacaccccgatattttatttagttaaggatggatttaaggaaatatttaaggatgcttaggaaactataattcactatatagagagatatttagcacttaacacacattttaaaataaaattcaatttgaaccattttagttattagaaaattctataaaagtgctaaacataaccttaaaagttttcttgcaattataaggtaaagaaattaatttactaaggtggattagtaaggttataaattaaatcactgagtgaatacaattaggctattaaagggaaccaaaagtatggagggtagagcatggtggtccgtgggttaacaaatcatataccaaagctaaactagacaccaatttaaatcaattgggacaaaggaccaagcctaggacatttaaacatagccacggtggggaaaagaaaacaaaacgaaacatgcattattggagactaagttggctacggtcaagggaggaaaggaaagaaaaatctgaatggatgatttcatgagtgaggcacgtgtagtagtcaagaaaaaaaaaaaaagattaagtgggccaattcaaaggaaacaatcaaatggcaagtcaagcatggtgcagattttttatggacaaaaggaatatgcattaatggcacaacttaaaagtcacatgggtctatctctaagtctactatccgtacagatcaaagaagcaaagatgaatttggactccttcaactaaagctaaccgtgcaagatttgggaagaagacaaaaaggaataagccacactatcaaagtatattctttaggaagaaaaaaatctgctgggaagaccacgtaaactgcagattttttggccaataatacaagattccaaccaataggattaaagccaacatggaatcatactatataaggcaaggagggaagaaattggggacagccaaggaggaaaataatcgtgcagccccaccacttgaaaagttgttttcaaagcttaattgaagtctcacacaaaccacttcactatatttacttattccactaagctatcattttcaccaaaattctctaaggaagcaacaaggatacgtgaagctttgggagcaaagagcagctggtcccaatttgacaaacatttgaggtatagggaaagctttgataaatgaaatttaaatgcttaaccacatataaaaccaatacttctattagtgagaaattaaattaatgagtaataggagaaaacttagctaaattcaacttttaatttgatgtttgatgttctaaaattttggtttatttagatttagtgatgctatatatggtttggtaatatctcttgaattttctataactattgtgttgtctaattgtatttgagtaattcttgctatggtgatgtggtttagtaattcttcactttctttccttatttcaattgatttggtttcttttaattatcaagaatacatcttaatttggaagtaactaattagaagcattaattatgtgagaaattaaaactacgtatgcttgaaataatttgaatatgaaaatgggataatacatatttggtggtaacaattaattctttgttataaagctgtattttctgtggtgttaagatgaggttatgatgatgacttatgaggttgtgataagtctgggataaaggccctgtaagaatgacgttgtgatattatgatgaaaataaaagaataatttataagatgaaaatgaatcattcatgcatttcatgtgcatctacccggtggggtagaatttaatgatgatgatgaggcgttactcatgaagaagtgatcctcgtaaagaggtgtatgcgtcagataactaaactgagtccatataacttgggggtagaaacagtgaggaccacaccaccatgatgatcacatggatgggagtgataatcctatgcgccactgagctaccctgactggatggataagttcgttccactaaggtgagggtggggttatctgacagtggccacaattatttagatgttgctgagatctcagtcatgcatcatataataaagatgagcatgcattttcctgtatgattgaaagtggaaaagaaattattctaaaaagaggtgaaagaaaaaaaaatatatatatagtaagaataattataatacaagttctgtattctattttgtttaaatacgcattctatattttatttattacgtattccaaattctatttagcacgtattctgtactttatttattaaacacgtattctggattttaattagataatacgtattttgtaatttatttaattcgtatataagtctaattctctgtatttggtgttgtgattgtatttaaattttatttatcatgacttaccctattttgtgtcttgtggttgacacctgtgatgaccccgattatttgggcgagcagaggaacagtgaaatggaagtggtacaagaagatgtggtgacggctgttatgataactttctgtttgcatgttttctactatgttctgtattatggactgtatggactatttggactgtatggactgtctgaactgtttaagcatcaaaactggtaatgatgttgtatggcaagtatgtatgagtaatttaaaattacgttatttagataacgcgttaacattgaaaaatcatttttaaatatttttacgattctttatcacttccacaattaacaaagaaaataattgaatttttactattcttgttttattgaaaaaaaaaaaaaactagaagttttataaaataaatacgaatcaaagtaaaatcaaagcggtcgttacactcggcatgctctgtctccgtcctggagtagattagaatgtcatcaatgaagaccaccaccaactgatctaggaaaggtctgaatatcctgttcatataatccatgaacacagctggggcattcgtcagaccgaaagaaatgacctggtactcaaagtgaccatacctagaccggaaggctgtcttaggtatgtcagctggcttaatccggatctgatgatatccggatctcaggtctatcttggagaacactctggctcccctcaactgatccaacaggtcatctatacgaggcagtggatacttgttcttcacagtaactttattcaactgcctgtagtccacacacaatctcatgctgccgtccttcttcttcacaaagatcaccggtgctccccacagtgagacactcggtctgatgaacttcttggacagtaggtcctccaactgcaccttcagctccctcaactccagggagccatgcggtaaggtgccacagaaattggtcctacaccaggaaccaaatcaatggagaactctatctccctctctggtggtagttgagttatctcctcaggaaaaacatctacaaactcattcaccaccggtctccgagataggtcgacacctggcttatcttctgtaactcccaagaagatatagccctgagctccctctctgattgccttgcgagcttgcaagactgaaagaaatgctgtagagctcaaacctgcctcaccagaaggcacaaccaccttcttctgacaacagtctagcatcacaccatatctggtcatccaatccatacccagaacatctcaagggtaggcatcgctagacaaaacaaatcagccacataggttctgccctcaaagcaaaactgcacgtccttgcagcacgtgctcacctggcatctctctctagatgcggtcataacctccatcggaggggtcaaactggtcttaggcaatctcagcctctcaaccaccatatcctgaataaaggaatgtgtggctccagaatcaaacaacacacgaacgtcacagtcatcaatcaggactgtacctctgataagatctggagctctagccgcttctctggcatccacagtgaacacccggcctgctgtaggtgccatcacctctgctggaaccgcctgtgcccgagtctctgtctgagggcactctctagatatgtggcctagcttgccacatctgaaacacaccatctgtcctgaggaacacaatccccagtgctcacgtccacaggctggacacttctgaggtggtctccttcgagccaaactactctgcccagatctcctcttgaatctgtctggtggcgtagagactctcaactccttgcccttacccttgccgggcaggcttgaaccactgggccttctcccctctggtctgactgaaggagtaggctgcctgccactctgcctctacaggataccctccacctggcggccctatctcaccagggtatccatatcacgtgacccactgccggccaccaacacctgaatgtcatccctaagtcccctcaggaacttagctgctaaaatgtctgcttcaggcaaaggccgcctgaagtgtgcatacttggccaattcatgaaactgggccaagtactcgtccaccgtcctgttcccctagatgagactatcaaactcggcttgcttctgctcccgagcgtctctaggaaagtatctgtcaaggaagcaggcctcgaacagctgccagttaatcaactatccctgacctctcattagctgtactgtggtcttccaccactcatgagcgtccccctgaagcatataggtcgcatatagcaacctctaatggtcggggcactccataacctcaaaaatcttctcaatggcctgcagccaccttgctgcagcaacgggatcatagtcccctgagaacactggagggtcgtgcttccgaaatgtgatcagcatcttccctctggctgctacatcactgtcagcctctatctgggacatctggtcccctcgctagtggctcccaccagcctgttggcgactagcctcgccctcaggtgcaggaggtgtggaggatactctgtcatccctcctgaggttcttcacctcctctaacaggtcctagttggccttcatcaaggcctcggtcatctctcgggtggcagccatctctcgctgcatctctccctgagcctgtctaccagcagctatctcttgctgcatatccacctgaatctgtctatttgcagctaactcttgctgcatagtggctaaggcagccgcaactggatcagtctgggcactagtagccccactggtgccactgggtctcaccataacactacacatgtacatcacacagtgagttgatcaggcccacagttaatgtacccccgtgcaatgctcatgtcatacaaccacagacaagcaccaaaacacattccatacataatgttctaatcaagaaaccgctctgataccattaaatgtaacaccccgtaggctgtcggtgcgttattattatgatatcagttagcgcttaaaacattcatttaaaacttagcggaagtacaggatcgattttcctgattcattatgtatggaaacccaacatatcacaaacacacacacatacaaaaccatatcatacccctgctgatccagtttatctcatacaatacacatatagacagatttcttattcagataggcatataactgaaaaacatccaatataagctcagtagaatcctataatatacatcaatagttctgttcatcaaatatacatcagcccttacagggtatacagaactatacacgtcatagggtacatacaccccattcctatcaagggaacaaaacagaaacaaagccaaaaagatctcgcagctctccttgctgcttcccagttagcagcatgtcatctctagggcctcctgccctgcgtctgttcttctctcccagaagaatcacctgaaatcataagccccacacggggtaagatacacatctcagtaagctcagggtccttggaggactttcctccaccctggcccacttccataatacattcatcaggcatacacacaaatggcccaccggcctagcatatcaggtcctcataacaacatatcaaacatccaaacaagtcaagcaatggcgtatcatcatcaacgccaggatgcatcatcatcagcatccatcctcagtgtgataccgaaaactcacacccgtgtcatcccattgggtgttacccttagcatggatgcacgtatatggtacctccaagaatagcaggaatcgccatctactattcccttggtctaggggatcatcatcaccccgggatcatcatcacccatgagccaaccatactaggaggaaaccatctcctagggaggtccatatctatccgttggccaacagttctaatcacagtcatagcacatattcttaagcacagatgcacaatcatatcatcatgaggatgcaaactaccaatgcatgcagtatggaataaccaccactcccccggagtgtggtatgcaaaccagatgggaaataatccccagggacactgaacttacctggcaaagccccgctctgcagttctttccctggtctgtggctcctgccaccaacagtatcaagctcacggcctaatcaaggcatatgtaatttcatatcaaaactagccatcaggcatcaaccacagaacatatcataatataacataaatcccctatcctaggatataaacaaactgagcccactctggctacacagagacccctactaggtccctcaggctgaatgccaaacctctgagtcattccagactccaaatatacaagcatggcctaagctcatcagccttatagccatcaatcatcattggaacggtctaagcctcagcccagacgctattccactagcctctccgactcaaaaccaacataaacaagctctggctcggcttaagaatcacaagtgaccttgtcacaaagccacacatacaagccacagagctcaaaatccaaagttatcaaaaacagaaactgaaagctaatccttcatctattcatcgcactgaacacatctctcaacaggactctgggctaattctagccccatcacaaacgggtcactattcatgaaacccctcagattcaaaatcaaacggagaaacttgtgtttcttacctcagtggcgactctaaaggcctcaggacagcttcctcgagcttctttgtcctttatacgccgtgggtcttcgccaatctcaagctctctgagcttttcctctgagaaatcgcttctcactcagaaaaggggtttcaagagcggaaaatcgaaggattcaagcttccataggtttctctcacactcaaaggtcgaaagaaggtgtttagactctcaaatagggtcctaaaaagctcggaaactcctctaatggaggtctggacgaaggaggaagaagaaggagagaaaatgccatgattttcgggcttctaggccttttataggcccagacgtgactcccacacccccagcgtgggctcccacgccccaagcgtgggttggcagacaaaattgcacttctgggctgcttcccacgccccaagcgtggacctcccacgccccaagcgtgggactccagaagaaattggttttctgagttgtttcccacgcccctggcgtagacccccacgccccaagcgtggaacctcagaaaagccaaaaataaagctttaaatgcatggttataacacatgagacatattttaagttattcaactaattcattcaaaggaaaatgaaagataaacccaattgaatgagttattgagcctgcaacaataacagaccagagaccattgtaaccaatgagaagaaaagaaagaaaagaaagagccaacctcttaggcgtgagattctatagccaacttcaattgattcactcaatgaaaaatgaaagataaacccaattgaataagttcttgagcctgcaacaagaacagaacagacaccattgtaactaaccttatcagaccaaagagacattccacaaagcagtttcccacttatctatctattacccaactagctgaccccaaacaaaccttaaaaacagctaaaaactactaaaaacaaaaagaaaaaagaaaaaaatatcaagactaaactgaaaaatagaatgaacacttatgcaaataactaagaggggggtgaattggtttttcctcagagtttctaaaatttaaacaattttgtacacagcagaagactttgaacgaaggatcgtatcttaaccaattaaaatatcaaacttttaaaatcaacttttatctcaatcaacccactcttgagcttcacacaatcttgtgatgttaacaaaaataatacttcaagaacaatatgaatgtgaataaaaaattacaattacacacaagatttatactggttcacctctcaacctcagaggctacatccagttttacttctaatcaaccttgattagagtttccactataacaaaatgattatctttacaagcaaacacagatctcttttacccaccctaggtaaaattcaaaatctaaacctatagacttctcaaaagatttaagaaccatagaatcagagatcccttctctgttctacccactagatacctatctagtaatgctttaaagatacaaattgttatatcaacaacaaaccatcaaaacgaacaatttctatacaaaacaacaaagaaattaattaaagaaagatatcacctgtacatcctcagtgaaatgaatgagtttaaatgatcaaaccagactgagaatgaatgtcatgatctttcttgatgatttctttttgacaaatgaggctttagcaaaaactaatcatgaaaagatgactcaacacatgagaatcttcatgattcttgaaaccaaatcaatgaatgtttctaaagagccttggtgcttttaaaatctcctgagactgtgtttacaaggcttacttcgtaaaactaaaagtctcttctcacttaatgagttgtatctatttataaaaaatagaattaactgactgtaatcgattattctgtaatggtaatcgattattttaacaaatgtaatcgattaaagatccaaaataatcgattaaagtgttcatgtgaaatcaggaaaaattcttaagaacaaataatcgattaactcatgtcgtaatcgattatcacagaggatctggattttgtgaagcactgaagtaatcgattaatactcaaataatcgattaacacagggagtgtgaaaaacgtatcaatgtttatttaatcgattacaatactctgataatcgattaaaccagataaactttcttctgaaaattatgcagatggacaaataatcgattaatccgtcacataatccattatcacagaacgacttaaccaagtcagctgaatgtaatcgattacaaacatttggtaatcgattaaagtgttcatatctttaaatgcagttatgtaaccaagcaattaatcgattaagtgtaatcagtaatcgattaaagcagtgaaaaacattttttatgaaaactttaaagctttaatgtcatgcctaatgatgattcatggaatgtgtatgacctaatcatgaattaatgagctaatgtatgcatgacttattcagtttatgtgaggaatgagggattatatctctcttgaaccaagcctttaaacaaagtacatatgccatcaatttgagtgggcatgtaaaatcaaaacttaagataaagcttgacttgattcttcatgatcatcctcaacctctgcatcatatctaacataaacaaatgcagaacacaaacgtactcaacccttaataaaaattctaatacccaaaaaatcaaatggctgcaaaggcacttttttgtaagataaaaatagaaacaaaagaatagagcggacatataaaccatgtaatatattttgataggtgtaatgggaaacaaaagtaaataggacttcatttataaaagaaccatttgttcacacttcacataatttggtttataaataggccttggtaggaacatgcctatgacaaacggttccagcccttaaaaagcatgtaaggtcctttacatatggcaatagctgatataagtagcatgtgaactatgatcccgagaaccgcagccacgatagcaccaggaagatatcgcagcctgcatcgaaacatggagccccatcagccttgtgtttatctatctaaaagacgtttctatagccacataagacagacaagggactacctcttatagggaagtagctacaccggtttttatgctttttcttagtgacagaaacctttcataaatctgcaagaatagcatatttgccaatcattagagaaacttgattttgcatcttctaacactgttggctccaaaacaggttactgtgggtgtgttttaatagattttgttcatcttagtagtcaattcaaattgttaaattcattctatatccattgatttcattctacttgaatggatcattatcataggcagtatgcatagcatccatattgttcaaagcaagaggaatctacataggaaaattagaaataatttgtgattgagaatgcacctggtcataaataaggctagccttgtcaaagcgtttccatgcttgctgcattaagagaggattccttaggttagaaactaagtgcataacttgctcatagaaataaacttgtgaaaatccccacactccttgtcctttgataccagttatacaaaaacatgaacagtgaagcacatttgataattcacgcaaacttattatgcttattatctagtttcatgaccacaacagaagcaaatgcaatatacacacacacacaatatgattacatatatggtagcaatgtaaataacctatcaagcatatcaaccatgcatcatttagtattagatttgttatgattacaagacctttataggatctggttgatcataaaatcggccagcaagggtaattgagattgtggttcgaacaaaagtgtaagaccctccaattactgcaggcagtcgagttccaaacattgtttgcaacaatgtattaatactggctacaaaaagcagggttttgatatctcttgccttctcattctacaaatattgaaattaaatttttattatataattttggctaggaggaaaaagcatcttcaatcatatggttagattatcataatattccatatcaagtcatttacaatttcctgtttatatttatttaacaagtaaaaacaatgacctacatgaaaagaaaccatgtaaaatctcccaccaaacttctacatattttagtcattagaaaattttcttacactaacctaagtatagcataacatgctacagtaaattactaacaatagtatcaatagagacttaaaacttgtacgaggattggcctgataagtaataaaacctgcatatgcatcaagaacaaaacaagctaacacagatgccagaatttccccaaaatagccactggccacagaacgatggcaaggccagcatacggcacacatattgtctcaaggaaagggccttcactacctatgagatcatgaaacaaacggttccaccccttaaaaaacatgtaaggtcctttacatatggcaacagctgatataactggcatgtgaactatgatcccaagaaccgcagccacaatagcaccaggaagatatcgcagcctgtatcaaaacatagacccccataagccttatgtttatctatctataagacttttctatagccacaattttgttttactttgaagttcccaaaatctgcctttgcagttcactagtttgataatcattggttaaatatagcatagaccaaacatacaactaaaaacaaaaaatgcacaagaaagaatgaacgaaaaaacaacatagtttcaccttcttagcgaaattcgtgaggaaaagcaaaattacttagtaacataggtgatcctgtgatgttccagccatgaacaacccaagcattgagcatttagctaatggtcccttggaatgcctgttaatatcatgattcagatatctaagaatttcacgataacaacttgtacataaatatttgtttgtatttcaaatttggatacctgaggagtgatgcagtttatcgatttatattggcaattatatattgctagcaggttatctcctaactaacaacaagttgacatttatggaagaacaagagcatactacatgcaaataaatgaataaaaaatacacacaaaaggatagaagatggcttaattaaattttccaaggtctgtaatagtaatattgacatcattactcaaagagactttgtctcggaaataagtcccataaattgaattagcagaataatttcctccaactttaatcattgcatctatttcatcactttaccattcaaccaatgtcatagacaaaacctgaaactaagaaaataatgtcccaaggctttaaagtaataaaataatctaattcttctaaatagaacaattcatttgaatgataaaaataagtaattttagtttagagaatatgtaaagtgaagtacctttaacatttgattatgagcaattgatgtgctgctaacacatcttagtttttaggattaatttagttataattcaatcaataattaggaatataggctagaatagttaagtttatttatttatttgttattatctcaatttattaccattttgttaattcagagccaaaaagaggagaaaagaagcaaaaaggaaacgactgaagctctcgaactagccgcacgattagcggcgcatcccgcgctgttagcgccagaaggtctggaaagaaccctaaaatcgaacatctcacgcgatcagcgtgagatcccgcgcgatcagcgccacaatgattctgtttccagatttaaaaatatttggcacgaaaatagaagaaagataagggttttattaccctaattaaatggagaacgtgcaagtataaaaaggaggcttctggactgatataaaacacccttggacacacaaatacagacagaaacacagtggagagaagatcaagaccagagattgaagaggattaatgcttctgctctctttgtattctttgaggttagacatgaacatgtctggctaattttctttattgtggttagggccaagaaccaatgtgaactcctctgtaatttgattggtattaatatgagattattatgattgctttgttttactctgttcttcattgtcatattctttcttagaattggccattctatttaagttctgagagttaggattcgcaatagggatgttgggattctaatttctgacatgagtaaaataacagtttttacattgcctagggatagggatgtatgattgcaaaactttataatatattcttttaaatgcttagcttgataggaatcgctaaggaattaggatttttgatcaggttaaagggttaaattgctaaggaattagtatttaactaaatttggagagatatatcctctaagtaatcataagtaattgaaattgataatcaatcaagtgaaagaggtaggaatcaaaggggattgtgttctaaccacaattgtttctcatcactgcgtaatcactaattcaaacttgctttataatttctgtcatttatttaatttgcttaattcttcaacacaacaatactctcttttcaattttcttgtttcttccaatctctaacaccttgagttacgataaaattaggaatcaatccttgtggatacaatactctacttacctactctattacttgaaacgaacggtgcacttgccgtttcgcaacagcaatgcttccaactaactttctatcatgagaaaatgcaacagagcgaacctatataggtgctgaaataaactcaaaatataaattccaacacatcatgttaatagagtaagcttgaaattaaaaagctttctatcttcaatcatacctactaataaagtaaaatctattgatgcattcaaacatcaaaacatcagcatgtaattgcttaaggtaactttgagataaagataaaaatatttgtgaggatgtggcagctaaaacaaacagaaagagaagaacctttgccaagaccaaatagtaacatacaattctttactatagtttgaatcatagtacaacccaaagccccaggaggaaaagggaatgaaaaggatgaattttcttcctttaattccttaccacaactcatctgctgcaccaagtgcacttcaatatgcttttctaatttcaatctcagcactaattaaaaagtatagttttcagttatgataaataaattcacttaggatattccccgtatataacataacacagtattggtacaaaaacttcatgctgaaaattaaatgcaacatttaacctaaccaaaaatatgtatacataatatatattaagcaagagagtttgaggacttaaatcatgacagtgggaaaaacaaacctctcttgtaaagggtattcctttgactccagtattattcgtacttggcacatcttgggcatcttatataccaatgactttaacttttagagttgacaactctagacaattataagagtcaagagtgcaaggtcacattagttatgcatataaagaagcaaagctgacatatatagatctcattacaggtcttatttccagcaattttctccaaggctgcctcaaaataatcatatcttattattctaaggaatcaaaccacaacaattacaactacagggaaaataatggtatggtatcttgtaattgtaaagaatatgaatatctcacacttaaccaagtggggggtgaattggttaaaccttggtaaattaaaaatttctttaataaaaatcagagttcctaggatctttatcacttttcaaaaccaagaaaccttattcaatcaagtagctcaaccccaaggaattcaatggatcaaaactgactttggtcaagcaatttaaacaagaacacaatgaatataatagttaagagaaagagaatcaaaacacaaacagatttatactggttcacttcaacactagaagctatatccagttttcttcaaaccaacactaggttagagttccactattataattttcatttcttacaatcaattacaatgtctccctttatcaaccctagataaagaacagaaatctaaaaccctgttagattctaagagacaagaacctaagaacactactcagttctttcacctagagaaccccttctctagttccaagcaagaacctaattacaatagccaaatcacaaagaaaatacaaagcaaaaattacaaccagattaaggagagaaacaacttgatgatccaacgatgcaatgcttaatgatgttaccagatcaggttgaatgaatgaaaatcaattagcacaactttccttaatcttgaaaaggtttcaagctccaagaatgagttaaacacccatgatcaaggcacaaaggagcaagaaccaattaaacccttagaaaacacctaagaatgctcacaagactatttaaactcagaaagtacgtatgggtaatgttccacaaagttagaaaagcagttgagccttagttctatttataatcgattaaggcaggaagatgacttttattattaagcctgtgtaatcgattacaatactttggtaatcgattattccaacatgacttaaaatcatatttgactatgtaatcgattactatccattaataatcgattaaagtgttcaacaaggcagtttgtataaaaacaaaggtcaaataatcgattattccgataggtaatcgattacattgttcttgaaagcttttccagaatcaactaagaacaaaataatcgattaagtcattaaggtaatcgattaaaccagtaggaatggtattttttcaaaatcctttgaatcaaaacaaaaacttagtcaattaaccaaagccttgtgatttttatgaaccaaattgattgaattatagaatgatatgaatgcaatgcacttggatcactagaattgcttttctcttacacatttcacactaattaatcttcaaggcatccattgcatgttgaaagctcaaaaccaaagcttgaatcacaattcctttgcattctttaagtagctccccctgaatccaacagtaattgcttacaacaaacagagaaaaatatgatgagtataggccataagggtggtaaaaaaatgaactttataaggaatgaagcatacccgctaatttgccatggatctgaatatcaaaatacaccttgtgagtgacaccctccaaatcctattccaaaggggtatcctacagaacttggaaaaggggttaatgttcataaatttgtgattgacccaccaaagtccaaacccaaaaaaagagaatgaaaacttcttctccatcgtttaggctagcaaatgcgtctctgctatcttcttcatctgttggaggcgatgctcgcggagggcctcgatgtcgttggcgtcaaggtgctctaaagcggtgatctcattgtcgatgttgtcctcgatggcttgcaccgccacaaagaggtggtggtgcgggagatttgctcttcctttgaaatttgccctttgcccaagacctgcttgatcttccacatcgttccaccgttatagatctaagcttccttgatgacaacgttgttgacaacgaaagggtgcaagagaaagagggagattcaagggaaaagagtttgtagagacaatactcatatgtgttgaagtattgcatgaggtgagagcaaacggatgagagtaaatagattcaaataaaggctatagggctcaaaagagagaagttgagagtgaaaaatccatcaacgacgatttttaaaatgactactgtccttaagcgcttgtatactaagacagttcttgcgatgaccatcgttaaacacaacatattatgacggtttttaaagaattgtcgtcatctatatctatttatttacaaaattgccaccgcgttttcatttagaacggttttctaaaaaccgtcattgatagagcgtctttgaatatactttttgtagtagtgaagaaaactctaagacaataccttggaaatttaaagagacaagcaacaaaagcaaaaattttagaaaatcacaaactcaaattgaaatttaatgagacaactcaaggatatattggtggtaccaaactgcacaaggaggatataccaatcacattcaattgttagaagccaaatttcaccaagtttgcatgtcatacaagttcacttaattttgtggttcaaaggaaattcgaacttgtagcttttgtaactttgctttgcttctaaattctttttttatttcactttttccagccacaaatcaataatttgtttgggtgtaccaaattgtgtttctttttccttttcttgtttctttcacacaaaaaataatttgtaagctttttgtttttcttttgtagaagttcaagaattcttaaagaaacttaatgaatcatgaaaaaactgttgattctagtgaagccaagtatcaaggaatgaggatcaagcttcaaggttttggactttcaaacatgcacaaaaggatttactcaaaggaaagcttgaagaatcaatttgatcatttgtaaaaggaagtatatgatctgataatccaagtgtatgcatcatgcatcattcattcattttaagatcattggattaattgattaagtaaaagcaattgattagaaaggcacttagaatgtaaagttttttggaaaaattaagttgctaataaataatcgattacatgaataggagcatcgattattttgttcttcgtgtcctttagaaaacaaaacatgatcattgtaatcgattacatctcgatttaattgattactcaggctttttatgaaaagatggaactctctgtcttaatcgattacaatatatgtttaatcgattacatgcctgaacgtgcatcttagaaaaagacatgttgactgtcttaatcgattacttcatggaataatcgattatattgttctttttctaaacccagaaaagctcaagatcattttaatcgattacattatttccttaatcaattacgaggtttattttggaaaaacatgtgcccctggcttaatcgattacgtatcggaataatcgattaaatggttcgttcttgaaactcaggacattttataaacattttaattgattaatatcttgttttaatcgattacatatgctaaataatcgattattggagcgtgtttaatcgattattttcagttaaaaagttgttataaatagaacctcttcggctgaggtttgtaacttttgatcatttgtgaaattttgaattctaaagcattcacaaacattctgagctttcattagtgagattctttgtgttctaaacatacctagcttcacaaaattcatatgggcttttgaattaagaaggtgaagcatttgttcattcaaagatgaaggaaagggaatgcattaagttgattatctgtcattcaattcgtggattcattcatttacatgcattcttggattatcaggtgatgtctttccttgttctttgatggtgtaaactgttaattgaattgtttgtaaagattggtatattgtaaattagtttcttgcaagtgtagagatagtgtttctctagtttttgctgagtagtgttcttggcaaaggggtttggtctctaagagtctaatagggttttagacttctgaactttatctagggttgataaagagagacttgtataatttcttgtaaggatatttttgcaatagtggaactctactctagtgttgagtggaagaactggatgtagcctcatagtgtttgaggtgaaccagtataaaatctgtggctaatctttcttttaatctcatcatctctttattactttgtttgtgaatcaatttaattgcacagaattctatactctgttttctattctgttggaaagggaatttgattgaatattgattcttggtgttgaaataattttgaatgtgataaagatcctgtggtaactctgattttaaaattttaattggccaagattcaaccatttcaccccccccccctcttggttgttttgaagtgttcctttgttttttcaaaaactatgtataacaattgtaaaatttgcttctaacaactcaatccagtttaggcatgagattagaatcaaaacaagtggttatacatcacacagaacactactaacacaagttgacaagaatcaagactagaaaattagaaaaatatcaagaacaaatgaagaatatgaagacatggaatcacgcgaaacttgaaggaaaaacacaaggttatgtggcggatcacagcaccaagcccacaccattaagatttttcacgaaaactcaaggaaactaggagaattccacaaggattagactctagatagcacatgatgtaggtctaaatccattagaaattaatttcccaaatctaccttgcaatgaaacccaatcttcaagcttttcaagaacacaagctgtccaaacttcacgtgaaacacatagctggttggaagctttaatttgcagcaatggaagatggagaaaggttagggatgaagatggaagacaccatggagataagtctaggaagaatcgccacaatagcattgagaagccattgataagacccaagaggttcttgcacaagaacaaagagagaaactctcacaaattttagatttgcattaatatgaacaaagttgttacattcagtttttggggcagcttatagccacgaaattacaaaccaaatgcacatgaaacgacaaattaaaatgaagcttgtaatgcaaactaaagaagcctaatgcaagctaaatgaagcttgaggtgcaagcttccctaagtgactcttggttgatccaatctgtaccaatgttgcagtattttaacttctaagtgcagccaacaagcttacttaggtgctgcacaaattacacacaagtgcacctacacctcttcacacaattgcactaaaaagcctttttattgtcactacttttgcgactaacaagtgctgaaatttatggaattaaattgaacttgagacatcaaaatccagcccttgttatccttgaattggtgtgcttcttcatgcttgtccaagttagctttgatgtggtcttgaagggcttgagttttaactcttgtcatgggtcctctaaagctcaccaaaggaagttcttcaagttctccttctagacgtttagcttgcaatggacctccatcaaatgtttttcttgtcttttagttgttgattttttctcatggcttgaagttttctcttcatctagtgagcgtgttgacttcattacagtacacaaccaaggacactttgggttttcttttgagctttcaagcttatcatccttcatgagtgacttatgacagccttgggtttactttatatgttttttctctacagaacttgtcttttctgaatacacttaagtaaactcatcaacaacataaactcaaaagggctatgatttgtgacagaagatttgttataattaaaacacaaagggttttgaactcaaaaatctccccattttttatgatgacaaacctttgaacaaatctaattcttttgaagtgtttctcagcatatggcatattgtaatcaactccccttcaatatatgcatccatttaaatattatttcaaagatattcattaagcataaagagcatatatgaagacattttgttcaaacaaagatatgaatgaataaagcatataaaacaataaggcaaacacatatcttatataaaaaataaaagatcaaatctttttctctcctccttttggcatcaatcaaaaggacaaatgtaggatttaagagaatttcaaataactcaatccctttttttccattgataaccatagatagatgtttgcatcttaggagatttcctaagaatgaaaacaataacacaaagtaggggtttagtatataaacataatgtttgttacctatgatctccaagttttgtttcctcctattttaaatgcacataaatgccctaagcatagtgcaatgaatgagttttctcaaaacaagagatacttagcgcacaggttatttttgtcttgctaagaatcacaatgatttcatcctaagaacacatgtaagaaatttttgcacttttcttggattattctaacccaaggatttataggaaataaatgatgtaacgatccacctcgtcgctacaacatcactactctaaaagcgtaatttcaattttaaattaaaactccattaatttgattatgaaaatgagggtaaatttttcgtgataatacacttaccagacaatgcacaaatatatatatatatatatacacacaccattatatatcattcacatgtcaaaatgttattcaatttttacatgtatctaagccttggatttacatgcccaatcaaaaagaatcaaggaaccaactaagaaatagttgataacaaaacacaactctctcccaaaaaaaattcaaagttattacgtcggattggtggctccatcaaaagaatctccctccaacaaacaccagatgacaatgattagcaagaaaacaataacaataaccacaatcattctcaataactcattagttcaacatacacttaacaaactattcatcaactttttccacaattcaaatcaattatgctcagaatgatgcatgcacctgactcaacttcaaatgcaatgtggtacctttcatcaggaaatagcctaagcatgtacacatgacactctcacttaggaaaaccagtagcaactttcgaggtcagcatttcatgcataggcaactcccccccatgttgattagcacgagtctcaagggagttccaaaccgagtgatatgcccccaagtactatcatttttccttatgaaaaatcacaggtacttactgacaaaatttatactatttccatacaattatggagtatgaaacatggacatcatcaatgcactgactatggatagttaaaaattctaagcaatcattttccctttcatacaatcacaatccataataccacgagactgatattttaggaaaaattctaaattaaagaggagaactatggtatacaagacaaattcttgtgcccaaataaaatttaataaagaagtaaatagaagaacatatataaatgttttagcaaagtctcctctgtaattaagacttttccaaaaattccaatcattacaacaacattcttcacaatttcattcatcaatatcaattatatcacatcccactagttgaaaatacagtttttcttgaaaaccaacatgcacagggacaaacacacaccccaataattgggttccctaaccccaactatggtatcaaaagctgtaaacaaacaataaacttccctcacctatctatatctctctgttaactccttgcagtgttgttttgagatctttcaggttcatgtcctttggtccaaacatagagctctatataccaaattgaagacagttcagtatatatttcgaagacatggttcgtattaacatttggggtcaaatacacatttagttttaaaatggactaaaatggtgtttttggagtctacatcatagagacatcattttaaaatttcgatcacgccaatatgaccggggttcaacgaaggtcatgaaaatgacatcaattttataaaaggaaacttttacaacatctcattttcaaagatttttcaaaggaactgtacaaacctccaataacggtacccaaatcacaagagatactaagagaggtttaaactaactaggagaagacaaaaaaatcatggttatctcaaagaaaccacgaaagaaaggttgagagctttgttctctaccaaatccttgaggtgggttttgaacgttcctctccaattaaagtgttcatctccatgtggtggtctggctgtaagcaacaactgctcgtgacagtcattggtggtcgtgggtggtggaggaggagctctagggctttgggtgacggtttggagagagaaaaagatgaaaatcatgtttttcacactgatgaacgtatttataatcttcaaatctcacttagcgaactcatctcattaagcaaaattccacttttggcgctaagtgcaacatttcgcgctgagcgacttatttcctttgtgtggaagtgctcttagttcactggtcgtaagcgagctgtccaaagatgttattttacaaatctcaacggtcaaaatgtgcagacatgggttgtgaatctacagtccatgtttgaaggcaatccaatggttaacaagtctgagatccttattttaccaaaacaggttttgggtcaaacttgaaatcacacatttccaacacaaatcaatcaaactccacataacctaacattcacaccaagcaactgtacaaggataattcacacaatacttcaactaatccaaattgatcaaataacaaaagaaatacatcaaacatctattttcaattatcgaaatttcagagtgttacatatgacattttcacatataaggctttgtagaaagagccttcatgaagaagtaaggaatgcattaactaagaatttcttagcatctcacagtatagatagaacaatgttcacatccttatcaataaactacccctcattttgaagtaggagagacatactcatgttctccatttttgtttagatgctataagtgcaagcttaaaaactttgaatttcatgattctatgtttcttgatcactctcaatgagcagtttcacttttatgagtctttccaatgactttattgagaaaatgtctcattctctcagttttctaagcttcgtaaaatggttctctattgattggtttgaacttacatgtttgacactaaaataaactccctcatattttaatagacatttctaaattatgatagcaaatggatgatttatgctatagtttaacagcatacacaccttaaagttgcaaatctatcatacaagatgccgcgcattctcatagtagagattgtactcttcaagtaactgtgagacataatttaatgcaattttttctggtttaaaacacatggcagcagtgaagacatatcatgcagacacactctgttttgtacccacacaaattatacatacatcgaattcatcgatttctttcctcttctcgttttcaaattctagtgcgcttcaatttaatttgtttttctatctctctcaatatgttgtaacttcttctaacaatatgtgcttgttgggtctaattttcttcaattgttcttggcgaagatctgaatttggttatacgtttgatcttttagtttttatttttcccctttctggttcttatggcagcgaaggagaaaaggtttgagatgtggggaggtgatgcgtcgacgcgaccaatgaggtgcggtgggttgaagatggaggttgtttgattcaatgtgtggtggtgatggtgtttaaggtgaggtgattatgcctgattgagttttttttaatttgattcttgcattttttataaatttttgtaattattgacagttttaattctcataaattgtattttgaattttaaaatacaaaataatgtcacacgtaagtttagaattagaccaaaaaatgacattattatttataaggataaaaaattcacaaatttttttgtaaaaactaaaattgaactttaaaaattttagaaagatgaaaattatattttaatctttttataaagataatttttttattggatacgctcactttcaaaattagttaatagtctttattttataaaaaatgaataatttaaaacaaaccaaaactaaaaattaacaattattttgtaacaaaaagtctttctaccgacagcatcttttttttttcttttggtaccgactgcatttctactaataaggtcaaagttcaactttgactatgatcacgctttcttatctatttctctttctccccaagagtatgcctagtctagtggattgtaactggtgggattcaatcatctttaaacttctcaaattcaattagtacattttgtcttatgtgaaattatgatggagatgtcactactaaataaaagttcttaggttcaatcaactttacatttatctgtgttttcagtttatatgtttttcataaataattataaaaaatagatttttattttactttgtttactatttttgaaaatttacaaaagaaatgaaggaactttaattgttttatttaaactattttctttgcaaacaaaacaaaatcaaacttttataattacttaagacatatttttttggttattgatgattttatttgcattgaatacatcaagtaaatggcgtgcacacatgcttgtcatttcctttgggttcttatacttttgatggatagcctctgctgccaaaggggttcttccaacaaataagataagcaccattcacatatttgagcactattattgatgtaggctgctagaaatataatctgattgacctgtgaggtgagtgaattataccgtctaagcactatatcatagcacgcatatcttaatggttggactatttttgcagtacggggaatattggctttctccatggtggaaacttctcatgcaccttattacaatattatttgcctagtcgctttgaaaactttagagactaaaacgtttcttttttttcattgtactaaatgatagatgacagacttaatttcgcggcaattctttgtctctctaattttttcctcacctgaatactactgttcggtcctatatatataattaaaaataattacataattcaagaataataaaagtagttaaattaattagtttgttacaaattttaattttattaatactattcataatcttaaatgatttaagatatgattatttttcaaaaaataatttttcagccaaggattttcttgttttgttaataactcaataaatgcaccaactttaatagaaaaagaaagtaatcattaaggataaaaagaaaaattaacaataaagtaatcttgtatttcgtataattaagacaaaaaactgttatcttttcatatataacatcagaaataatatataatatagtaaattatatgaactctcccttgaagtttgctcttattatatttgatatatcacttcattttttttacattagtttgagtttcctaaggaggggttaggataatgcttttgatgcctaagaggtggagagtcaatagaaagtccaaaaattaagaagatttttataggtttaaatataattttagtttttatttttttaaaaaataaattataattttggttttttttaaataaatacatttactctttaattttttaaaatctacaatattgatcccttatttaaaaacagagacatttagttctccatttttgtgaaattcacgattttggtcattttattaaagtgaaagtattaactattaataaattaacattgactacgatataaattaaataaatatacaattttgtatcacgttacattagagttacatcagattaatttcatactaaccaatttgttggaaggacctaaattacatattttataaaattagggggttgaatgtctatttaaaaatagtaggacaaaaattacagattttgaaaaatatagagacaagatatctctattttaaaataaagtaaataaaattgtaaattttaaaaaatgaaaaaaaaactaaaattacatttaaggatttttataaggtttaaataacagatgggtatcgaatataataatggcaaatcatagttttggttcaatttttagcttttcatacatttacttttttatttttttattttaattaattaagttatttcttgataaaaccttaaataaacatgttacgtctaaggttcaatcagattaaaataaaatgaatgaaaaattgagaactagtagattaaaacctaaaaatgtgaatttttcaaaatatggatattaaaatagaaaaagtaaagagtgaaactaaaatcgaaaatcaagaattgaaggtgagagtaaaattgcaattgagccacataaatttttgtcaatgattagtatttaaaaatttataaatgtgttatttatcctttcctgcttaatatcaaaatatttatctcaaatcaaacatcaaaagcgcttctcaaatcaaacatttgtattgcccaattaatagataattatagttatattgaaaacgaaacatactctcagacttgaaacaaagaacataaagcggaaataaattaaatataattctattgaaaataaaaccttattctctgttttgaaagaaataatataaagtggaccattgcaaacgtacgtagctttagtttgcatcacgttttattgtatagatgtaaatgtattaagaatcattatattatccacccgaaaatgggggtagaaagaaaaatataggaagaaatagtgacaaatagtgtattaaaaaaagaaaatgaagagaaaaaaatgagttaaaaataaaataagataaaaaaaattaatatgtatattattttttaatcgcataatgcaagcaatcatccattgtaatattttttttatatatcgatagtctttatacttcacaaatcagtcattagtgacaattttatcaatgaaatctatctcaattaattaaacagagagaacatgagttattatatatttctttgacaggatcttttgattttcatggaaataaagtcactaatggcaactttgaaaattaccataattcatgccaacaataatgtgacagcagcatgcgttggatataacccccgttattccattaagatttaagttgtactataaattactatatatgtacacgacaactcaagaaaagtaagaagatcaacaagtaaaatctcttcagattctcctcaactttaaagtagagttagctttagttatactatagagcatgtgctttgtgtgcatttttgttggtattttcgtgagcagtatatattctctaaatgatgaggactaacccagcgttcagattccatttttttcctatgatgaaaattactagagagatggaagagttggatttaaatgttgataatacaggaataatttaatggccggtggtcccatatattccatttttggttttcagtctctacattacatattaagtttttccatattggagagcagaaataatcaacacgtaaatcacgtgatgctttgaataaaggacttggtggtattttttttaaaattttatccgaaggacttggtggtatgcagtcttgtattattgcattagattagatatggtaataaataattaatccaccaactcaggccactaaaataattataattatggttgacctagattaaaaaaggttaaactgggagtgctttgtccacaattcgtgtagctctcaatcctagccatcaaagggatttgagcttaattagcaattgacctcatccttgtttaattataccttgttagactgtagggagggttttgattacataattatcaagtggaattggttgggtgcagtattatcatattttttattatgataatgtgcagtattatgagcttgtggctgcagatgttactcctcctctaatataggtaacaaaataaaatgaagggtcagaaaaacaaatctgcacaaggaaacatgaatcattaagatcacaacaaaataaaataaaataaagggaaaaatttcctcatcgatctccgttaagaaacatcattagtatcacaacgttttattaattatgaattattactggatgactgggtgggagtggttgttcgctttcacaggtgttgtatatattttaattacgagcgctggataggggtgagaacacatcatactagactttgcaaaaataggctaagttaggtctcttataaaaaattaagacatgctctaatctattagtctatcaggggttttttttagatctaattccaccttttcaaaattttgatgtaatttattagtttatttcaagacttttttatcttaaatatttattttatttataatagaacattattaacttattaagatattaaatataaaagtaatatatatatatatatattaaattttattacatttaaatgaataaacaaattgacctatcaggtttaataggtttttttataagcttagacctaccttatttaattaaatagactttttaaaaaagtcaagtctaacctttttatgaaataggttaggtcaaactttaaatagacaagggcatagatccttgttggcagcttgacctattctcatctctattgttgtcaactatgggtgaaaataagttagtttcctcaacaaaggctgatgacttgggttaaacttaggctattaaaaaaaagttgaatttttattaaaccctatttaattaaaaagatcaagctctaggtcattcaaaatagctttttgtcctaacaaacttgatagttatttaaataaatacaaataaatatttattattattgtcgttggtgttattgttgttgatgacaactactagtggaaataagtcaaggctcttatcagggttctatatatggcttagcctatataaggtctagcttaagctcgatttaaaataaaattaaaaaaagtcatgataaggcttttattaaaccatgtttagctaatctagaacatttaaaaagcctaataaccctaacagattgatctatttaaataaacacaaatatttattgttgctatcattgttaagagtgttggcaacttcaattggaaataagtcagttcatttaatagggacctataacctagcctatattaagcatagatcgactaggctttttaaaaaaaactatgttaagacttttgatcaatcctatttagttctaaatatcaatctctaggtcactaaaaaaacttattaaccctactaaaatgtcctatttaaatagacataaataaattattattattattattattattattattattattgttgttgttgttgttgttgttgttgttgttgtcgcatttagaggtcttactacaaaatgtttttaaataagttataataaatgtcatattagaccttaaaaataagtttttaacctttctccttgttaaattatcacaaaatagacccttaaaaaggcttgaaggtcacttgatttttttatctgcaaatgttaatttgttagctttgttaaaagttagtatgggaatttgaacatgtgacctccccctcccttcacccttctccaaccactagatcaaccttatattacctgttacttggcttttatatataggttaggttaagtccttaaaatggcctttgacaagtaagcatgatggacttagaccatgctttaatcaaagttaggcttagtcctagtaatatggtataataatactaacaatagcgctcaacaaaaatccctaacactcttttctaatacacactttattattgattaaaatttattgaaaattaaaaaatctgaagaaagacttattaaataaaaagtaggacttaccaaaaatttaaatttttaatacattttagttaataataaagagtgtattcataagagaaaattcaatgatttgttaaattattgattaacattgctcttttttacaataataataacaataataataataataataataataaaattaaaacctcaaactatatccaaaataaagttgattctagtgaattttcattgatgttgtatattgtctatcaggaagtagtatatcaatggtgccatcaaaatcaccaagttattatagcccaaattaaaataaatttttaaaatggaaaattattttccttttattggttaaaactttcttcaactttaatttgggagttaggggcagaattgattttatttttccttttttactttttgtctcaacaatttcatacttttaaccattttcttagttaaatttaaaatttgttaaatgttcgtaccaaaattgtagatgatattcatgaaatcatttttagtgaaagatcataaagttgttttgttttagacgtaggcaggtatttttccctgtaggcaattcagttgatccatgtgtttggtggtgaatgttattttaaggatgaataaaaattatcatcttttataatttgtagtttccaaactgatatgacatttactttgtataatataaatacaagctaagctttcattcttgaaaataggataatttgtgtacatgttttcttttctatgaactctcgtatcttttcctttctaagagtgctttcagaagagtaccaatattcatagagttataaggttagcttggtggttaggaaaagaggttgaagggagaaaaggcaaaagagatcgtatgttcaaatctctccctaacattctaacaaaaactaacaactaacattggttgataaaaaaaagtcttataagtcactaccacagggactttcttaatcagttgtttagaacattctacattggttgtagaattgatgtagatttagtcaattagaatctcaaaatattttacaaaactattattgtaacaatcgacgtaaaaaatcattgttcacaaaaaaaaatgcataaagattcataatcgcacacatcatttcctactacaaccacaagtactatgccacaactttccacaaccacgatggcaccaacacacatgctacttcccacaataaaggcttttaaataatattgtctaaaattttcaactaattcaagcctatataattcaaaaaaatatattctactcataccttggtcattgcaaccttaaaataagttcttttgataatcacaagcaataataatagtttcattacaagtttaataattatgcatttcaaggaagtcaaaagctaattgtcaatgtttctttctatagcaatattatggttgtcatggtagatattgttaattttgcattctatttcaatatttaggttaattgttggatttacacatacttccttttttggtaatggggaaataaattgacaaatacttctaaaagagtgtatttagttctcaaaatttcttgttttccttttcctttgcttgagcacaaagttttatgtttgtggttttggtgaatcttcaacttgtgaagattcaatgaatcaatgtgaactaataccaaaatcaataagaaatattaataaaaaaaaacataaacaaatagatagaaatgtgattatattttttatataaaatattatttttgtatatattgactcttttataaatgaaaacaaaacttttagaaattctctctacaccaccccacaataaaagccaccactttgtgatggacataacgcaagaaaattcccgatatgagaaggatgccacatggcacttaacgataaccgtcataaccaatgtaaccagtttagttaccaagttgatgttgaggcataatcctttttgagctaagtgttttaatgacaacaaacttttaatatgaaaatcttaaatcctttagtcttgtgcttttaatggtttgtcttgagtgctttcaaagtaacatgacttagtcaagaagcatgaagaaagatgtgaagcattggcctacaactataggttcttaaatttgatgtttgtccaactttagaagcagggaactagaagcagaaaggaaattatgagttatatgtcaaagtgtagatataagaagttatatatgactagaagcatgatagtaaaggtagcctaagtcaaggggtagatattagaagctacacatgacttaaggatcatcataagatgcattgttggagacaacaatgaagacatgaatgtttacacaatcgagaagcacattctatgagttgtaaagatctatgtcatccattagtgtactaatgcactatctggatgaaactcccttgatctaacaaatctatttgaaagtaaagagagctaagtcctaaattagccaggcaaccatgaagaataaaagtagtccttaatagtctgcaatgaccaagagaagttccacaccattctattgaaaacttatttttcaaaatgaacttggcctacgtcttcgtctaatatccatccaactccgtcactcccattgcgagtaaagagaatcccaatgctaaacattttcaaaagtcttgatgcgtccatctgctttcttgagaataaaataacataatagagtgttccaacatcaaaaaacatacaaaaaaatatgtaaattgaaacatataaaacccattaccaagacctaaaagcaaaccctagctaacctaattatcaacatcacacaaaattacaagatgaacaaatttaaacatagaaaaccaactagcatcgcaagacctaaaatgaaaccctaaaacaaaacataaagatagaagagaagggaagaataaaagaggtttgtggatgagaagtcaattatcatgtaattttgtggtggcttaacaatgatggtttgaaggtaggggtagcaaggtcatcatggtgtgacaatcatagttcaaaggtggtgttagcaaggtcgcaatgttatcataatattgttttgaagacagtggcaaccaaatcgtagttgtgcataatagatttaggatattttgaacgaacaaagaagggagatggtggttgtggtttgggttcatggtatggtagcaatgatgttgttggggtttaggtgcatggtgccatcgttatgggttatggtggcaaagagaaaaggaattatgagggtttcaggagtagaggattgaggcaatagctagcgaaggagttctcgaattagtgtaagaacaaaaaattattcaccattggttctaattagaaccaatattgaaatttttcttcaacatcagttataatttaaatcaatgttgaaatttgttttcaacatcaattttgttttgaatagatgttcaaataagttttttacatgggttttaacttaatcgatgttgtaatgttaaatttaatttcataaatgtcattatgtctctttctacttaagtttttgaataactaagtagaatcgataacgtaaatgtattttgtacaatagtgtatggtggctcaattaataaaatcatgaatctataaataggcttatttagccattttttttagtcttatttagtttttagattttgagcgagtatttctcaaatacttttttacttatgcaaagattccacttagtcaattgagtcactttttataaacttggtgaatgattgagtttctttaatggacattaaattaaagctacaatgaaagttctcctacggtttcttcattctactaaatgttttattttctttatgtaattgttattgtgtcattgctccaaattttagttttgcttaattgaatcttattatgaatgttctttgtatcaattttagaatttctaagattaacgcttttggttagatagaaaccatccaaatgaacctaatttagggttaacatagtacaaagactctaggttagtaaactaaaacataagacatgaaataagcatatgactctaagaagagaggtatttgtgttatgtgtattatgttgagaactctaagcacaatgcccaagttttcaatgagtgcgcttaagatatttaggatacttatattgacaactaaggcacattatcaaggaaatatggcaaggtcctaaggaaattcaaacattgaacaattgtgttagttagatagaaaatagtaaaatataagagcaatgaagcatgagttataagtacatgcatgtatttttgttgtctttatgcttcgagtctttttcttgtgtgttctgatatgaaccaatatggggttcatcgtttttacggatcgtccttgaaaaggcttcttgttaaaatataagaaaatggtgcacgccaagtgtttggctaaaagaaataaagataaagacaatatgaagaaaaatgcatagcaaaaataacaaatttaacatgaacaagatgttaaaaaaatagaataaaaataaaaaggcggggaagacaagaaatggaagaagacgccacaccttatgaaaagtgataagtcccgtggggatttgccacaaagattatagaaaacctttgataagaaccaatgtttggtccaattaagaacccaagaggaacttcctctcacacacttttaaaagtgtaaaggttttattcaattcaaaggtgagtacataagacaaatgaatagctatttatagctaacaagtggtgtctctctcctttttctctccaatgtaggactttagttacatattccttatactaaaaaaatgtaattcgtgcttaactttatgtcccattttcatcattatagatgcagaatttggacttgagactagaaatacaatttgtagggaatctttagagctttcaaacgcatcaaagaacgcctaaaacagatatctaaaactcaagttatgttcaaaacattggaggtatgtaggtttttcactcattagtctttggactattcactcatttgaatcaattggagcaatctaaactcttcttccgggttggtctttggactcaaggcaaggttgatatgttgacccaatgcttgagaaaggaagtagttcacttcatgatccaatgcttcttgtgcttcctttgatcttgcccttgtcatgggtcctcgcaattcttggtcctcatcatgttcactaggtgaaatccaaagttcaatttaggtccaagctaacaacttactaaccataaattgtaccatcctaatctcatttgcacttgactaatgttgatcattagtacaccatgttcaatctaatttctgaagaacaatatacttgctaaataagattgtaatgatccattcaccatatcaattcctaaacacattttcattcattgaactctcttctattgtcataactcaacttttgtaatcttacataacaatcacatcaatttggtcttttttattcattttttaaaagaaccaacttatcattgtactcaaaaaaaatattaatgttgtactcaattttctagaaccaattcaactggtaatgtcacattgttagcattcggttagaggagctaacataaaggtcaatttaattaatagctaatattttgaaatcatgtttaataaattttactgctcttgagtcaattataaggaacaaaacaaaaggttttggtggactcaaatagtataagtagggatggagggagtggggtggcccaagggggccacaaccacccccacttttgcaactcctttattgtattgtgcatatgttaatatgggttcccttagttttgttttttctttttggtaaggttcgctttagttctaactctttattatggtaactattttattttaaattataataattattttaaaaataatattttatcttttatgataatatttattggcttctcttatacgtattaggcctttagtctttcatagcttctctcataagttttttctcttttcactcataatttttctcttctctcttctctcatttttattgccgctgtcaaagcctacacgaacaaagtgcaaccaattctatttcttcatattacctttgcaacatgggacaacccattgcatttactatccactttgtttgtctgttatgtccctttcccccatttatcattttttttatttgtattgtgtacgtgcttttagttttagtaaccaaatgtcaatttccatttttatttgtgtttgattattgggtacatattattctaattttcttttttgcttgagatgatgttgctttcctattcttgtgttccatctattatatttatttctctcgtccctaaatttattattggcattttaacggtggatggtttaactaacttattaatttttgtcacaattttttagtgctttcaatctctttgtttctttgtcatttgtgcatatattgctagcatctttgttccttcattgatacttttcttttcaacaataattttatacttattaatttattttgtcataatttttttataatgccatataatgaaattactcatctaattgtattatttattcaaatatggaatattaattgaaattttttgtggttaatttctatacatttttaggtcaaaagatgtttaagaataatattttttatcatttataggagaaaagaaatagataatgaaaaaccacaactggtatttaatgcttttacttccaatttagatactaatgttgaaattattgttgaacaagaacaaccatagaaaaacttgtccaaccacctacttctaaattgaggactgaacaagagagaattaacattgatactttgatagtgatcctgaaaaacatccaccaatttggaattatcctgttaatcaacaagatgaaattcgtaaagcgtatatataatttggaccatatcatttttttatggatgtgtttccattttttggtcaagaagatgatccttgtcgatttcaagcttgttgatttagaacttttccttggttagagtattaactagaagcagatgttgtcttttgctttccatgttatctattttctgaaaaatcaagtccatttaatttgaaaggatttagacatcgacaaaaaagttaatagtggaaaagattctacatttttatctcatgtgggaaagaatctcaattcacctaacaattttgctcttagatgttatgaagattttaaaatcaatcttgtcatatttacacggtgctatctaaacaaacttcacaacataatttgagtaatcggttgtcttaaagcttgtatagatttcgttagctggttgacatttcaagtttgtgcctttaggggacatgatgaatgtgtgagatctagaaaccaaggtaactttcttgaaatgataaaactctttccttctataataagaaaataaatgaagttttcttggaaaatgtccttcaaaattcaagacacagttcctccactattcaaaaagaaattctacatgcctacactaggaaagactttcgatgcaaaggatccccaagccaacgatccaccattgtcatttttactcgttcgagtgggtcaccaagtcaaaccattggctctgataccaattgttgtgcaactgagggagtaaacaccagggagatttataccgatgagtcatgagcaaccaaataagtgaacttgacaccacactttaacccaaaaccttaaggctctggtttatgggtcttctcctcacttatatggtgctcaacttttctatttctacccaatttaggacttcacctcacacttatactccaacatgcaagatactacatcatccactcttataaacatgatatgttcaatattatctgatcataatcttaacgttcaaactatttggggtcaaggatatgatggagctagtaatatgcatggagaatggaagtagttgatgtgcaagctttgattcttcaagaatgtccttatgcatattatattcattgatttgctcatcaattacaacttgctcttgttgctttagctaaagaggtagttgatgtacatgtttttttattctaaatgttgtgttcttcttgtaaatgcaatgataagttacaagctacttttgcaactgaaattgctcatttggttgcaaatgatgacattgagaccagaaggggagctaattaaatttcctctttggtgatactagatggagttctcattccatttcaatttgtagtcttttacgcatgtataatgcaaccatttcagttcttgaagacttagccgtcaaaggatctacttctgcttaatgagataatgctacttatggctttaaagcattaatctcatttgattttgtttttactctacatgtgatgaaataaattatgggaattgatgataaaatttgtcaaggtttgccaaaaaaatctcaagacattttgaatgctatttgtttagtttctagctcaaaatctttaattcaaaagctaaaagattttggttggaatgcacttttagaaaaagtcaaatctttttgcaataaagaagttattcaaattcttgatatgaatgtttctttttttgacataattcaatctcgttgtctaaagaattttgtgacaactgagcatcattatcatatagatatatttaatattgtcataaattatcagttaaaagagttgaatagtagattgagtgagaaaataattaaacttctaaaatttagcacaactttagatcctaaagatacattcaagtcatttaatgttggagatatttatactcatgttgagaaattctactctttagatttttcataccagaaaaagatttagttggaatatgaattgcgacattatgaatttgatgtaccgaaagatgtcaatttccaaagtttgtccattattggtgaattatgtaaaaaattagttgagactggaaaataaatttgttatcctttagttgaaagattactacgacttgttttaactcttttggtgtcgacaacaaccacaaaacgtaccttttgttgggtactgagcaatcacacaacaatcaagataggagaatgagagaaaagggaagaagaaaacaacatacagagtttatcctggttcacccaatgtgggctacgttcaactattcactatatttcctcacacacttgtacaattgcactcaaattacaagaaaatatgtaggcttagaaaccttaagcatcgtagttattcatgggcccaagccaaaactacaaataataaaatacaaggccaataacagtactacaaatagtactcaccggggagtgaagcccctgtgcatatcttttgaaggcacagtatgagccataccaaacattctcccactaggcgaatgctttgcatgcttcttcaatcccaatacagttgtacaccattcaaacttcttgaaatcactgccttggtccgaaaatcagcaccattctcctttgtatcaaccttcttcaacattactactttgtcttcaatcttttctctgatgaaatgatattggacgcctatgtgcttggtccttgcatggtatcctgggtttttagccaaaattataacactctaactatcacacccaacagtcacatctccttgtgtaaggccaagctctctacacaatcttcgcaaccaaataacttccttgacagcatgtgccaaagccatgtactcagcctcagtagttgataacgcaacggtaccctacctcttgctcatccaactaatagctccaccaaacaaagaaacaacatatccactagtagaccttatactatcaatgtcacctccccaaccagcatccacaaagcactctaactgtaatggtggtggtccccatgaatctttcacgccttcatagcatatcccaaggtcagatgtaccacaaagataacggaatacacgcttcactaccatccaatgatcttttctaggcttggacataaacctactcaatactcccactgcctgggtaatatctagacgagtacaaatcatagcatacatcaaactcccaaccgcactagcataaggaactgatgtcatctcttctttgtcttcttcagtcttgggacattgatcaaaggataacttcaaacctttagacatgggagtctgcaccggtttacaataattcatattggatttcttcaaaacattttctatgtacttcctctgactcaaccataaccttcctctatgacactcctttttgatatgcatgcttaggatcatacttgcaaggcctaaatctttcatttcaaattgctttgccactataccttttacagtattgatcatcttcaaactgttaccaacaagtagcatgtcgtcaacatacaaggttagaataacaaagctatcttctacctttttcacgtaaacacaatgatcaacatcataatggtcaaacacaagtttcaacacataagtgtcaaacttctgataccacatcctgggagattgcttcaggccatacaaagacttgttaagcttgcacacaaagtactctttacctcttactatgaacccctctggctgcttcatgtaaataacctcctccaaatcatcataaaggaatgtcgtcttcacatctagctgatctacctctaagtcatatgcagctgtcacaaataaaacaaatcttatggaatttaactttgcaacaggtgaaaaaacaaattggataattctcaaataactaaaaaaagaacaaagcctttaatagctatttcatttattgagtgatctctatctgtgaatattcttttgtaaccaagcgagctttgtaacccattagcaccagtcttcttcttaaacaaccacttacaaccaattgtcttttgatctacagatagtttcaccaaactccaagtttgattttttatcagagagttcatctcttcgttcatggcttccttcctctatttggcagcatctgaatccctatcttgctttacagtgctcgggtcatcatctgtgatactcaaaacataattattgtcagtggcataaaaattatagtttttaggtgtatacctctcaggtggtctttgttggatataaggggagcatcaagaagattgaagcttaggacttggaaaaatgttttgagtttttcacatgccttgaagattgtaactcaaaaagaagtgtaaagaggccaatctattgatccttgcattacatgcatttaataatttaaatgcttaaatattttcatcaaagtataaaagaaatcttttgaaaagaactaaataggcaatgttttggaaaaatgcatatcttactgttttaatcgattacactacggtttaattgattatttgctttatttttaattatggaaaagctttgaagaactatttaatcaattatcactacttgtaatcgattacataagtgttaactgaaaaccttcactattggattaattgattaccatttctaataatcgattacacagtgttaaaagaaaatcatgcattgctgacttaatcgattaccatttctcgtaatcgattacatagtctatttctggaaatcatgtcattctgtgttaatagattaccatgagtcgtaatcgattacataagtgttttaaaccttcatgagttgttgctttaatcgattaccatacagattaatcgattattttgttcatgaaacatttccagaaagatgatgaacagtttaatcgattatttggctaaattaattgattacacctacggattaatcgattacaaacagttaattttgtttcatataaagcttgttgagtcttttccttataaatagacatattacgacttactcaacataagagagatttacccataagtttctaagttttcataagtgcccaaaatttctgtgtttttctgagttcaaacaatatcttgggtgatcaagatttctgagtttcttagagaaaatgttttagaaaaagaaggatttcaagattgtgattctgagctattagtctttgcaacctgaaagtgtggtaacaacatttcattcattcattcatacatgaaggatctcaggttgtgtttatcttgaacctttctttttgatgttctaacaatttctattgttttgtgatatatcattgtgaacattttcaagcacgctagagtagggttctctagtggttgagattctgagtagggttcttagtatcttggtgatttgtattctaatagggttttagaatctatatctttgtctagtgttgataaagagatcacttgtaaactgcttgtaaaagattctttgatatagtaataactctaacctagtgtgagttggaagcaactggatgtagcctcaaaggttgagaggtgaaccagtataaattggtgtgttctttattctaattttgttcttctctcattgtttgaatttggttgatcaagaaattatcaacaagatttgtttttaggcattgtttgaattccaagggtgatattggttgaaagaaagattttgtactcacaatgttttaagtgatacgatccatatattaaagtccgcaaattgttttgaataattttaaaaccttgatacaaaccaattcaccccccccccccctcttggtttgtttaattagcattcattatattttcaatcttctgtcccttgtggatctcctcaacctttgtacttcaactttagccttggtatcaaaaattgtatcttccaccccttcatattcaacaacttcagaatctgaattttcctctccaacctgtgagctatgaacatcaaactctactgtctatggcttttaaaaagcttctggaaaaatttgattcagcttttcttcccttaacacaacatctctgctataagttacacttttagtttctcagttccacaacttgtaccctttgatgccatccttgtacccaataaaatagcactcttgagacttactgtcaagcttgcttcttttctccttgggtacgtgtacatatgcttcacaaccaaatactctgacatgagagatgtttggctttcttttaaacaatgcttcaaaaggagttttatccttcaaagccgatgtaggagacttgttcttcaaataacaagcagtagataacgtagtccacattaggtgaactaggataaactctgtgtgttgttttcttcttcctttttctctcttctcctatcttgattgttgtgtgattgctcagtacccaacaattggtagcagagccgatggttcgacttggtgattgactcggacaagtaagaaggcaattgtggattcatagacatggagatcctttgtatcgaaagtcttcctggcgagtgtgagtccatgcatgaaagccaagcagcgggtcttacaagtgttgcagcggtacaaggtagccagatacttttgaatctcacacttgagggagagattgttagagtacaagtgtgaggtaagtctcacatcggataaaaatagaaaagttgagcactatagaagtgaggagaaaacccataaacctaagccttaaggttttgagttaagatgtggtgtctagttcacttatatgattactcatgacccattggtataaatctcccccagtttacccactcgacttcctaacacttttttagctatgaaaattataaaacaaagttacacaacaagatggaagatgattttctcattgattacatgattacttacattaaaaatgatattgctgaaaagtttatcacatatataataattgattattttcattctattaaacaaaagatagacacaacttcaacttcagaagtaaagcttcgtgtttgattttttatctctcttataatattaactataattatatattgtatagacttttctcaaattctttgcatgttggctaatttttaatgacaatattatgaagttcatattttgatgataaaaaaataattaatttattgtcggtcttgtattttacaggttccatgtcttttttgaatatatgggatgttgttgtttggaaggatgtttctattatttctctactttcttatacttttttgctattgatcattggacgtttgtgtactgatcttacttattggttagtatctctcttattgtactcaacacaattatatattttttttctcatagaaaatatattaaatttgttacatatgtctttcaagttggcctcccctaaaaaatttctggccccacccatgagtataaacaaatattaattactttcattctatttaatgatattatcctaaaatattctttgtgcgcttaattgaaaatttatttcaataaatattttgtattctttatatcaagttccaacgactgatacattagaaaaatatttatttttaaaatgtgattaatataaatgaataatattaactcacttaatcaatgcaaatattagttaattttgcttatagttgagtttgaaaagtgtaccttcaagaattaaaatgatattttattcaaatataaatattatcctgtttctatttattagactcaattttttaaaagttgtttatttttctatataagactcaatccatattgtgtcatgtattacttatttttatagagaatttatattaacatgtatttagaagagaaagaaacattaatgacaatgatattttaaaaaaatatataaatttaggataaatttattattattaattatattaattatttttaatcttaataaattaaataattaagtcttataaatagaaccagaagtagtatacttttgacattcatattctagatgtcccagttttcaaaaatataataaggatcacaatgaaattccacatccaattatgaggcgtgatatatacttattgtatgtttatccttgcaagttgtttattgtgtgctcataaacacacatgatgttgcagtgtgtgtatatatatatatatatatataatgtaaaagtaaatatattatttcaaacgttttaaattattttgaaaaattattaaataacttttgtgtttttgtataataaatattttttgacaaaaatctatttttaaatttgatcatgtgtgggggcattaaagaaaagaagaaactaaagaatccctttaagatttcagttaacaaattaaaattttcttaaaaaaaatgacgctaacgtattttcgctattatttccattaaaattcaactaaaatttctatttgaaaatttctatttattaatttcttaatcaatatcctttaaaatactagttagcaactcagaataaaaaaaatactcttatctttattattgtttattctgtagtgatattagtggctattgtctataaagtcaacttttgaatctctccattccatgtttcagacacacataaaatatcatatgtcaatagaattggaacaaaaagtcagcaatactagaataaaattaagtaaatattcattaattaagaaattatagacaaagtaatatatattaacgagaaaattttgatatacatgttatatattttctgtttttattcagtttgccttgtagagaagttatgaaatatagtcaaaataaataatataaaaaagaaaatataaaataaatataaaatattttttttaactatctgtaaaaatactaattaacaaaacataaaaaaaaatccatcaacattgttaaaatttaaaacattttacgaaaaatggaaaaaaaaaagccttttttccccctattctaagcttaaaagcagtctataggcggctattaacaacagattaaattaagaaaaaaaaaactactaggaaacgaaaaaaaaaatatttttacaattaaacttatgttaaaatggtgagattgctggattagattttttgtttaaatttagcaatgtaaatattcttaattatatcgctcatatactgagttcattataattaaactattaaaaataaaaatattattgaaattttaaattgatataaaacaattgtatgtggtatatataagaggaagagtaaaattagtagataaatagagtttaatattgatacccgtataaaacttttacactttaactaattagaaattactttagatatatttttaaagtaactataaaaaaaattaataaatttacatgatgagtcaaggctagataattgcataaaaaaatcacattgtccgtatttataaattaagttcatttaataaacgatcgatatgtaaagtagtcataaagaaaatgtaaataatacattctgcagtgaccagtttaatttgatttatatataatttattgtttaaattgctggtttttaaatctgggataaaccaaattgaccaataaatcggttatcgattagggttaagtatagataaactttttgtgtgtatttatagaagaaaaaataagaaggggaattaatataaatttcttttataaacatagaactaatttatgcaaaagttaaaaaatagttttcggagaagctcgtatatatgaaagagtttctataatttagcttatgcatgtagaactaatttcagtttatgagataagattattcttattttttcttataattaacactaataaatgctaattataagttagtttatccaactataacctaaataatcaaatcgtgtgtttaaaaaaaaaaaacaataatgttcagatgtaagcccgatcaccttcaaattatgtctttggttttagaatatttttttaggggaatcttgggttttagaatttaaaccccgtgagatttgacatatattagtaataaagttttacatttatattacgaaaaaaaaatatcaatttgatacaaatcaatgttgatataattggctaaataataatttgaaaataaaaaataaagatatctaacagaaatcaacctcgataatgaattacagttttattgatagctatgtgatttaggagcctaatcttgacgctggtttgttgtagaattgttttacttcatatttcattttcaacttttttaatttttttaaaaaataaataagtttttttagaaacctaattatcatttaacccgaaccaagctaaaaaatatcatattacgggtcaaatcagtttggatttacctaaaataattgtaagagttgaaaagtcctcaagatcattagaatcgcccatgaaagaattaaagatccactggaaaaagaatcatattcttttccatgaacctaggcttttcatatttagaaagttgatctagttcataggctgaattggagggtcgtaagtggaaggtggtggtggttgaagcggaagatatgaccatgagttttttgtttgttttatatttcaagttgtcatgggaagaaccaaattgtgtatttgaatggattcttaaacttatacaggccagtgaattgaacttataattaagatgtaggaaaatatttattaaatattagaaatggacatattgtcagaattaaacatataaaaaattaagtttgtaggttttttataccatagtagaattgaactagactaaactcattctaaaaattagatcagagaagaacaaataaacatatccaaatcttgtatcggatattttgtttatattatgagaccatagccctaggcaacatacaattatgcttttgacattcatgattttgcaatgcatactcacgacatctgtcagccttgaaaatgtgcattttttttttttttcaaatttcaagataggggaaataatgaattaaaaaattgcaaaatgaaaaagaaaaattacagtgaaacattaaatgcgataatcaataaatatatgaaactaaaatgaattaaactatataaactataaagggttaaacaatagatatttccagcaagtattatctagcatctatttatttaagtgaagcttaatttacattaaggttgtctaactttttttttttttttgagggaggttgtttaagtcgtgaattgttactttaattgcatttattcaagttaattatgattaatttggatataaatcatttttagatatccgcctttgttctatagttataaattataaatataattcttcattcattgattaaaatgtttataagatctattttcataattattaccaagtcattatacttttcttgtattgaacatttaactttgtttataattttaattctttcaaaatagtggaatcatattaaatatttgatgatacattctgtaccttgctaaaaaaaatttaataatttaaaattttaatattcatacatcataataaattgaacaaatattttattgtaataaataaagtcattttttcaccaaaaaaataaagttatttttaatattataatcttaattagccttactttgaatctcattttcaaattttaaattttgagacactataaaaaaatgataacatgtcttagttttgataatttattttcataatttcttctttaattaaaaaaatatctctttaatttaattttattcaatataatcaaatactcttgattaataatagaaacttttactatattatttaattacttatttataaatttaaaagtactcgtgcaatatatgaaacattttctaattaagaataagaaaatgataaagcttgctttcattttttagaaagaaaaaaaaaacttagttatgtttttagtccctcaaaatagaaagtctattttttagtctcaaagaaaattttacagtctctcgaatacaaaaaaaaaaaaatgctcttttagggatggatttaatggggacaatctgggctctaaacctccctaaacactttctttatatatgttccaaaatagggtttctcctagggttagagatttgctattttagaccataaaagtgtatcaagtcgtttagggttggcaaagtggatcagcctaccaaaaatgggtcgattggccctagcccaccaaaaatacaggccagatcgactggtccacttttgcaaagtgggctgaaaatgctaactcgccccacttttacaaatgtaattccggtgcaagttgaacaaaatttggatatgcaacaaactgaggaagaccaaattgggacgcagatcttgttgtatttaccccagcaaatgtatatttattgtttaaagccttaatagcctatcaacttcatcaaatgttgcatattttacaaaacaacttcctgtggaagttgaacaaaatttggactattgttaatacttgtagatatgatatgcaacatattacatctacaaatgcaagaatcaaatgaaattcattactcctcatgacctttactgaggatgatacaaataatagttaacacagataccttattgtgtatcagttttcttatgttttaaaggaacaatctcaacaatagttccatgttcttcaaatacagggcgaattacaaaaatcaaagatacacgagtaagagctataataaaaacaaagaaagtaaggaagaaaataaaaacaagtataacatcacacaatttgctaaaaatatgcatgataaaaatgtcaaaagataaataaataaaaccatcccttatatcaatccacaatttcaactacaacacgagtctgaacaaagttaacggaaaatagaggaaatagaacacacctcatcctcggtggctcggttgccgttcttagaacaggcaacatacacttcacacgaaatgtccacttgatctgcgagaatgaaatcaactcgtgtaagtagcgaaactatggctaatacccttacacatagacattgtttcaatttaaaaattccatcaacggccaaacgaaaggtaccttatggtagtggttggtggcgaactggcggtggtcttcttcttgggatgcagatccaaaacaaagacgttggcagtgcgaggacggagaccgcagacggacacgctagtcgtgccaagacagagacgcggcagtgcgggacagcgggagcagggatctctctctctctttgcaactggccgcgtctctgtgatgtgtgaacaacttctctcacggagtcacggtcacgggtctgcctccagcctccttagtcgtcacggtgaaacggtcatgagtgtcgaggtcactgcctcagaggtctctctctctctctctctcactctcgagtctcaacaatatcaatctcgagaagaagagaccaatcaagatcgagaagactagacgtcgagacctagaaccttcaaggcactgggctatgtgggcaaaagactgaagatataagatatttgtgcatttgagtgtctgggcctggctaagtggctattggactcttagtttttttaaaaatttgttttttgttggcccagtgggctggccaggccctggcccaattttggcctgcatttttgtgggccgggttggcctgacccattttactttagtggattgacattgtcaacccaatccacttttttcatggactaaacgggatggcccatcgggccaagcccattttgccaaccctaatgtcgctacccatgggtgagatgcagattatataagattttttgattatagtatgatataatcatattttatcttcataattcacagagataagatatgatcaaatacaattaagttagtatacgatagatatggtgagatacaatatgatctagtcggcctaaggcctagcggactagatgtggttggcccattgggcttggccaatggcttgatccattggactaacctcaatggagatgagagggtacactaacccctagctcaagtacgatagcatgaagaggctaaatgtataaacatctggcaaaagaaccaaaatggtgtttttttacaaaatatttaccgataaggggctgtttcaaaactatttacaaaactggggctgtgtaacatgcctgaattaggcatgttacaacacgcctagattgggcgtgttgtaacatgcctaattcaggcatgttacagctgccccatttttgcaaatatggccccccgtcagcatttccctcatatgttgccttgcagtcttctgtgtctttgctaaactgcctaccattcgagtgtattttcattttttttccagagatttttgaagttgttttgagtgacgagaagcctgagttcaagtggtgattctgttcgcgtttgagggatggtatgtgacaatggtttgcggttaagggtttagggtttggtgggcatggtacgtgacgtttgggctagggttgggttaggcttagatttcatgattctggttacatggtttagggttggtgggcgtgttgaatgacgtcctaaaccccaaacaccatgtacgcctgccgaaacaaccctaacccctcacccgaatacccaacccctaaaccccaaccaaaccctaaaccataaaccctaaacccaagaccctagccaaaccctaaaccccaaccaaaccctaaaccctaaacccaagacccatccagattagtgagttcaatcttttgctttagagcttgaagctcatgtttgaagagtctgcgaagatgagccttaatatatctggttggtcaaaagtttctttaaatcttgattctgtctcaagaaagaactacattaatcacgtacatcgaaccgagaagctgctgggggtcaagtgtaatggagaaaggcatctcaaaaggttctacctcgttgcttctccaaatagtggcaccaagggggaagaccttccttgcagttggcatatgctaaaagatcaagttttttttttgatttggagcagcaatgtgtctgatgggaaagtctttgagcattgatttccttctctatatactcaaagagcacgttcttcttccactttaggaaaagtagcccaagatggatacttgaagggattaatacctggaaaacccttccttccatagctttgtaagattaaggttgtcaagttatacttgttgaaatatctggatgaagaatgtgggagccaatatcacatttcttcttccagacttggttacaagtctgccattccaaaattttatatcctctgaacccatgatacagtttaatgtgaagattgggatggacatggatgtctagttgcttttgaacatatggtcttgaaggtaagatccatgttgttagttgttgtttagctgtcttcatcagtcttctatgaagcctattgaagagttatgttgctctaaacgtttgagcatgtcttcctctaatatatcataatgagtaataatgatctgttcatcagcattagaaattggccttggatgaaaatgagcatttccatgatctctctcaataacatcatctttatcttctacaagagctgacagaagcatggcctcctcacgagtttccctttgtttaggatccatgtctttagaaataatgacagcttccaacccctaaaccccaaccaatccctaaaccccagccaaaccctaaacccaagaccctagtcaaacactaaaccccagccaacccctaaaccccaaccaatccctaaactcaccataaagccttaaaccctaaacaccatgtacgcctgccaacacaaccctaacccctcacctttagggtttggctttagggtttggctagggtcttgggtttagggtttagttggggtttaggggttgggtattcgggtgaggggttaggttgtgtcggcaggcgtacatggtgtttggggtttagggctttgtgttgagtttaaggtttggttggggtttaaggtttggttgggatgtaaagtttggtatagggtttagggtttgtctggataaaatgattagaatttagaatttagggttaatgtgtagttattatatgagggttaaataattagggactgtagtgtttgagggattagggttggcttggcatggttaggttgtgtttagggtatggtcatggaacgatggtgtgcggttaagggtttagggtttggtgggtggttaagggtgtagcgtccagtgggctaggtatgtgacgtttgggctagggttggggtagggtttggttgcatggttgagggtttggttcaaggttcgggtttggttgcatggttgatggacctgattcatcgatctctgaatcggatcatgaggctgagccgatggatccgacatcttttgtggttcctaccccgtacaactggggtgctttgcgtaggcgtactcagcgcactcatgtttcacaagctgtgtggaaccagggcaacacccacgcacgactatggttcctaagcagatgagtattcctaatggtcctgttcaatgtaaccagcttgctattagcagatataatcaatgaactcaactttcaactggtaaaactaagatgtctttgaggaggacataatcagatttcctcaactccaacatcactatgtcaagaccgaagctttgcttgaagcatcatattggacattgatacaatgttgaaggaaacaactgacaaaatggaagtggcaaggaagcaaagtgaagagacaaaagcaaagaaaattgcagctaaggaagtgcttgccaaggcaaaacttgaattggaagactaattacttaatatgagtgaagtgtaagataacatattcagggtttggttgggtttagggattggttggggtttagggtttggctgtggtttagggttgtgtcggcaggcgtacatacatggtctttagggttaaggtttaagttgatttctttttagttactttttagatagatacttataaacgttaagtgattcattttttctggggacgcccaagttcggcgtcattgaagaagacgcccaagttgggcgtcattcaacacgcccaccaaccctaaaccatgcaaccagaaccatgaaaccaaccctaacctaaccctagcccaaacgtcacataccatgcccaccaaaccctaaacccttagctgcaaaccatcgtcacatgaccatgacacccaaccctatcccaaacgtcacgtaccatgcccacgaaaccctaaacccttaaccacaaactatcgtcacatgaccataccctaaacacaacctaaccatgcccagcaaaccctaatccctcaaacgcgaacagaatcaccacttgaactcatgcttctcgtaactcaaaacaacttcaaaaatctctgaaaaaaatgatttaaaatttgactaaattaatattaatcaaccatttatgcttcacacgtttcctactgtcttgtctctatcatgcttttaacctttggcttttgagaatttgtgaggcaaagtgtatatctgtccgtgttctgctattttttgtctttacacgcttggcgatttgtttttgcttgtcagtggttcccataagctttctaacacaccatgtatctcagcttccttccatcattcaaaatctcaaagtttcttctttttgatcagtgattcactggccactagatccagggattccgcctacactcacgaaagaaaaagccactgcaaaggataaactatactcaaggtgagagaaccctcattgcggggttaacatcgttaaataatagttagatcgagcatgctaaacataaatgtcacaaacataaatgcccaccctaaaccctgaacccttaaccacaaactaacgtcacatgaccataccctaaacacaaccttaccatgcccaacaaaccctaatccctcaaacgcgaacagaatcaccacttgaacgcatgcttctcgtcactcaaaacaccttcaaaaatctcttaaaaaatgaaaaaataccagaatgatggcagtttagcagagacagagaacactggaagccaatatatgaaccaactggggagcgggggggggggggcctatttgcaaaaatggggtagctgtaacatgcctgaattaggcatgttacacagccccagttttgtaaatagttttgaaacagccacttatcggtaaatattttgtaaaaaaacaccattttggttcttttgccataaacatctataatagatagattattagactgaaaccaaagatgaacgatatagagaactcgcataaggcgattgtgaatgttgggctcggtgtaacaacctatgggatattacctttgtctccttatattaacaaattataaaacttaatatataagcacatcggagtttaactatgcaaaaactaaaagtttaaacatacattacataaaccaacttatacaaagctcttggtgctaaagtttcttacaaaacataagaaatatacattaacataaactaaaatcccatacatcgggagatacaaactatagtaaaattcctccaagaaactccatgctccaagctcctccttgagcacatccacctgcttaatctgtaaaaacataaaactaaaagagatgagacataatgtctcagtgagtggtctaattaaagactctaggttgactctctactctagacatcattttcttaactctcatggtttatctttttcttttaaacctcacgactatggccctatcacatcaacattataggcctgttggatcataccttaatatttacttaggcgattagaatttacctcttatgccaaatataagaccactagtgcaataatgcacttagacatcattcttacacttgaccacttacttggtctcactccactttaacactggataggaacgtgcataacctttcctttactctgacttgcctaacttgggcttacttcacctctctctgtgaggcataacatttagcatacatcatctgggtagcttacactaactttcaatgtgtataatccctctcctacctctaagggtagttttcagctacacacatcctcatcaaatgtatagatttaccttaccacaactcctcatctaaaatagaaaacaatcatacatcaaacgatcaacatatcctagtttatttctacaagtgtgttattgtattatctttattattagatttcactttcattgcatattctattacttggctatactctatcaaacaagaagcatcctttttgctataacctttaattaaaatccaccgatccaattggaaggattgtctactccgttataaggaagagtctcatgatttattcttctttgtgaagaaccctttcttccctatgaaaaaggttgttattcttcctctcatagccctcatcgctcacctctaggaggacctcttagctcctcttttgggatcataactcttcttcaaaaactatttcataataatcattttataaggaatatttttcataaccattttcaaaacttatcactccttggtaacataaagggtcttaagcacctttgcacaccgttgtacaccgagcatgaggctctcagacgtgattggtattggggaaggctcgacctcatgtcactaaagggatattctttcctaaaaaattttcttgtagctaaaacattttcttgaaaaccatgattgaaacttaagagaaactccctgtctaacttgctaagaggcatgcatatagtcttaaatgtcttaagtatcttttattaagatgtttattgttacatacaatcctaagaatatgaaacaatcatatgagtaaaactacatttgactacacaattgcatccaaaatccataaacaagattccataaggaactccaagcaataacaatcatacaaaaaacatacatgggaggtagtgaaataaacaagcatggactccacactagttgtcaaacgtagctttaattctaattctaatgtccccatgcccaacctaaggtattttcatgcttaacatgaagtttaagaactcaaaccccatctctgcctccctcacatccaacttgaggaagcacacactcaacctaaagtctgatgccaaacctcagctctttgaactagcattctactctagttgtctcacgctaggcatgagaaaccccatgttaggcatgacctgtaaatcaacctttgcaaaaagtttgtgaatttctttctttggccatacatggattcccaaatgaaacccaagcatgtttttcactcctataacacttctataacaaaatacaaccttcaaaccacacaaacaacctctcaatcaaacttaattatcaaaatccccaaatctcctaaataaggttcaaaaagggaagacaacaaatcaaagggataggaggaaacacttacctctaagaacacgtggagatgagctctaggccctaggactccagatttcgtctccttctccctcttcatcttttccctctctcttcttttctttctttctttctattttttccccttttctaactctcccttctttagtctataaaaatagtgggtgtgggtctgttgggccttgattccctagttaggtcctagtttcttattttcacctattctattataaggttacaattattaataattcctaaaggtatccttcaatctatttattataaaatctattccttaaaatatatccttttattattattatttctaaactccacaatttgtgaaaccccaacacataggagactggaggttgggtcatgtggttgtcgtgcgtaagatcattcataggaactaatttaatgtttgacttgttcatctaatagtagatcgttacaaaattactagacatatttctaaatgataccctcgtccaattgcaaagcacacataattagaagtttcactcattcaatagtagatcataatgaattaacaaaaatactgccctactagtctaattgctaattatggtataagagaaataagttttttattttagctgcatatgatcatccctttgtagatcactttgtacttagctcaaattaaaactcaagacattgcagatcatgacaaaaaaaaaagtactaagttagcatgtcatgttcatccaaaagtagatagtaatgtgcttgtctaaaagtggagtgttataaaacttgctttgtgtaacatgttcatccaaaagtagagcattgtaaaaacttatatgaatatcatggttgtcgatgtacaaagatgtgtaacacactcatccaaaagtagagctttataaaacttggaagtgtaacaatctcatccaaacatagatagtaatgtgccagtaaagtagagcattgtaaaactttctttgtttaacatgctcatccaaaagtagatcgttgttaaaacttgtatgaagataatggtcatccatttgtagatcataaggacatgtaaagatgtgttacatgctctgattttgacttagcatgtagcctatatcaaaatcttacaatgaatctaggtctcaattggtcgacctcaccattcattttcttgagtaactccaagggatctaatgattgagattagttactcattacaaaccaatagatttcaataaaatgaatgatgagaatgaagagtaactcttttacagttactttggaagaaatttgatatatctatatctatatctatatatatataatgtaattatatgtaataggccgggtaggaaacaagttcaaaagacaaacctattattacccaatagtggcagacgcaagaattttattgagagaagacgaacataaaaaaaactatatcataaataaaagtgctccaaagacaatacaaatctaatatataaaaaattataaaaaaaatctattacagaaattaagatcacttcaattgactcttactctacgtgttttcatattgttaaaatcatctataattaaattcgtgctaaaactcaaaacaatttctttttcaatgtatgtaatcaaagaatcatcaagaaattggtcttccattctatttcgaagtctgatcttgattatcttcacagacaggaaaattgcaaacagggtgggtgaaaatataatgaacacttatgcaaataaccaagagggggggtgaattggttttacctcagagttttaaaattttctttcaaaatttataacaacggaagactttcaaaaggatctttatctttcaaaaccaatttgaaaatcaatttccttcaccaatcaaatctctcttgtgttgtaaccaattttgtacaaagaacaaattctatccttcaagaatataatgaaatacaaacagaatcttaaaacacacaagattatactgattcacctctcaaccccagaggctacatccagttttcttccaaccaaatcttggttaaagttccactataacaaatatctgttttttacaagcttacaactgatctctcttacccaccctaggtaaaattcaaaatctataccctatagacttttaaaaagatcaagaaccagaaatctcctctctgttcttccctctagaaaacctttctagaaaaagctttaaagaatacaaatgttatatggaaaatacaacacaataacaaaacaaatatcaatcaaacatcaagcttaaagttcaagaaggatatcaccttttaaccctcagctaattcaatgatatgaatgattcaaacaatctgagaatatatgcaatagatgaataatacttctttcttgaatctttctttgacactaccttgaacaaatcaccaattcttgtgaattatgactagaaactcatgtaactctccatgatactcatcatatttcattttctcactaaattcagacttgaatactcttgagaactttagaaagtgtttatcacaaggtttgtacgagtatctctgtttttcacttaaataataacacagtccaagctgttctatttataaaaaaaacatatataactaactataatcgattaattcgtcagtgtaattgattattttaactattgtaatcgattattttaaccagataatcgattaaagtgtcaatcaggaatctgaaaatttgtcacgaacaaaataatcgattaaatcatcttgtaatcgattattccagatgaactcagttttctaatacacacaagtaatcgtttaagttctcatttaatcaattaacatagaccatgtctaaaactgatcaatgcaaatttaatcgattacgaccatttggtaatcgattaaactagatgaacatgctatgtaaatttatgcagaagcttatgtaatcgattatttctcaagataatcgattatcacaaagactttctaattttgtgttaagcttatttaatcgattaaaaatcagtggtaatcgattacaatgttcataaggcaatatccagaaagcacacacatgcaattaatcgattatatcacctatgtaatcaattaaaacagtgagaaactgtttttataaaatcctagttgcctttatgaatttctatcaaatttcttattaccacatgattatatctaatcaaataaatgtatgaatgcatgaattaacaaaagctaatgaggattataaggctttatcaattgaactaagatttaacaaaaattacatatgccatcaaattgatttggcatgtaaaatatcaaaacttatacgcttcaagcttcttgatccctttgcttcagcttcatcaaatctaacagtgggttgatgaacaagttgacaaagtttagtgagtcttaataaaataattcacaatttaaaatcaaactcaaagcaataatatgaagataagagataaagaagacaatcaattttagcgtggaaaacccaattgggtaaaaaaccatgatgtccaaattggataatcaatccagttgacaactccactttgataattttgtgtacaagagttcctagtatcgtagttttccagtctacccttacacaataattatcctagctggtatccttgtttcccagcaaaaagctctattcttaactcaccaagaacagagacagattggtatccttgtttctcaaccagaagtcacacgtctcaattcaccaaaaacagagacagaactggtatcctagtttcccaactgcgaccttttccaaagtcaagaagaagaatacaataaaatggttatctttacgcttctattccttaagcaaataggtacctttaaatcctaatggagagttgaagaatcagacttgtcaaacgcttctatatgatctcacaacaattctctcaatgatgtaaacataaactctataaagttctaatattatttggaatggaatgcatactataaacacaaaaatatgtttctatttatactaatttaagcatatatttttaccaattttttaatgcaatcctaaaaatattctatcatattatgcaatgtaatcttaaaaatatcatattctatttttgaatgcaatcttaaaaaaatattttatcttattatgcaaggtaatcttaaagatattctattatattatgcaatgcaatcttagaaatattttatcctatttttaatgcaatattaaaaaaatattatatcctatttttgatccccaaaaataagataagatgaaatgattatgggctgaccttcattcggctcacacatctataataccacatttttttattgtcaaattatttttttaatttttaatttttaatatatatatataataaatttatactaataaaattttagggggacgatgatccaccctagtccccctgcgtccgcctatgttactcaaaccgtacactaacgatttggtttgtattgaaaaaagtaggtactaaattaattgagttggtttaaattaattcaagtttgtagattgtgttggtttaataagttgatttaaggtttaaatatatttttagtccttataatttagtattttatttttgtccgtgcaaaattattttattattttttaaattcttgtaaattatgttttttttgtttttagtctttaaataaaactttaaatagtgaaaaaaaaatattatctaaagtgtcttaagaactaaaaataaaataaatataatttataagcattaaaaaattaaaaattaaaaaatattaaactacaagaattaaaaatatatttaacccttgatttaataaaatcaagtgattaaccgaatacttgtgtgtgaagcttaaaagctgtaagtgtacagtagtgtttttcttcttcaaaatattttaaaaaaagttaaaaataaatttatttgtagttctataactttatcattagaaatcataaagcgcacatgattaatgtggattcaatgcgagacgactaaagattagaaaacgatggaccggatatgtgagcgaccgacttattattattattattattatttggaaaccggcactatgtatctcaattatcatttttttatatttttattttcaattaaaaactaaaattaaaatatgtaaataattgtcgtcacatttgagaagttattttttctaataactgtttaatttaaagatatttttagaattaattaaatgacaaaatagtctaaaaaaatgtttacaccaaccaaataagagtaattatatttcttaatacttatagattattattattattattattattattattattattattattattattaaatattcacagcattaaggatttgatctagacgtacgtattctcgtaaaagctgtagctttacactattggaaatactttcctacactttttttagggtttctataattttttattttttattcaaaggaggccggtctaagggtttctataattctaatatatatttttgttatattattgataaacaaaatttattgactttattgataattaaatttcacccaaaaaatttgactaaccactttaataaaatctctcttctcaatcattttttatccacaattatttacacatatatttacacattaatttaagttactttatatggttatcgtgttcgtcttataattaagtagagtataatataaataaaaattggattataattgcaagaataattactcttgtaatttttgtctgagtatgatacagtactctttacaatgccacccgaaagaataagtattatttgttttaaaattggacaaaatttaattttaatgattgaatttaatcacgaatttgaaggtaatagtgagaggaattattttcattccaaaacaaatagggactaggctcttgctactttaagtaattaaattataaaaaaaaatcattaacaagattcaatatagttaatagtgaaagaaaattaattcctaaatacttatgatgaaaatcatcactcaattaaaatctcataaacatcatattgaatcataaaaaaatcttaaaaaaataaagtgtatttgtttctgttgtctaatagtgatttatctttatttttttagtcttttaatctttttcttatgagttttagtcttcctcagtcaaatcactccttagaagatattctctttaaatgggaaaaaaaattgaaatttgatttgacctattgaggatcataatcttatatataatgtttttctttattgttgggccagtaaacccccattaaaccgaattgacccaacactggtattcatccatttacctcatatttacttaggaatctatttgggcatatttaattgatcactttaatttatccaatatatatatagattaaataacataatataattattaatacaatatgcagcacataataacgtaaggaaatctaatttcctaacaatctcccacttgggctacatattgacccgagataattatatcatatatccttagtgttcaattgtatactatttatccttaaatttctcctcagatacaatctagttcatctcctatatcaatattaggtcatggcggcttttgttactgttaggcttaactaaaccttccatgatcatcgtaccaatatattcaacgacgtagatcaagtatggttgagtggcatgaaaattacatgcaatgtgatcgttaccatgcctatttccaactggtccttctttagtctttataagatcaatccttaattttcaacatacaaaaagtagaaacacaagtacaaaaaatacacattcagagggaaaataacatcaaaatctttattctgcagaaaataatcatataaatgttttttttacatagaacaccaacataaagaactcccactaaatcatagtatcatcaaacaaaataacactcatatgagtagtatgctcgtgaaagaccttaggcacaaagcctttagtaagcgggttggcaagcatgaagttcgtccttatgtattttatggaaatctgaccactctgaactctttctttaacaaccaaaaactttctatcgacgtgcttcgattttgaagagcttctattattgttggagtacaacattgttgacttattgtcataataaatctttagcggtcttttaacaccactttctatacgcaaccttgtgacaaaatttcgcagccatatgccatggttggacgcctcaaaacaagctacaaattcagtgaccatagtagagaaagttacgagtgtctgcttaacactcatccaagaaatagctcctccggccaacatgtagatataacctgatgtggatcttttactatcttggcatctagcaaaatcatagtcagtatatacccaatgatctctaattcatttgacctccgatatatgaacatgcatgtaatcctttgttctatttatataacgcataacccttttagttgttttccaatgatctatccttgggttactcaagtttctgccgaatactccactatgagtcaggacgagtgcaaacttaagcatacattagacttcctacagctgatgcatagggaatcttttacatttccattgtctaatgattttcaagtttgtattgaatgtattaagacttgttgaagttaattgggtcattttcctttaaggctaaaatattatcatgctcttgcagaaaaacaatataatcatctaaaatagcacttcttctatctctagtggatcttcttaatgacatttcttgaggttgttgactttgttccataggtactattggggaaatttcattgttgtcttgttctggaataatgtcacgtataatagcttgatcattaattgtttgtactggagttgcatcttgaatgatgacaacgtcaggaatgatgacaatgtcaggaaaagaaacaattttttttcctcaaagacaacatttcttactttatcttcttccctttcaaagtcaacattctcaaggaatctcacatttcctgtttcaaaaattgatctcatagtgggatcgtaaaacttgaagccccgagagcgttcaacatatccaacaaagtagcaactaatagttcttgagtccaactttctttcattaggcttataaggccttgctttagttggacaaccccaaatatgtaaatgccttatgctaggtttatttcttgtccatagctcataggggtttttggtcactgccttagttggaaccctattaaggatataaactgcagtctttaatgcttctccccaaagtgacccaggtaaagaagaatgactaatcatgcttctcatcatatgcttaagagtcttattccttctctctgcaacatcattcatgctaggtttgcttggcattgtatattgtgtgacaattctagattcctttaggaagttagcaaagggttctggacgttgttctcctgatccatcagatctaccataatactcaccaccaaagggttctggacgttgtatatagccttagttttcttgcctagttgaagctcaacttcggctttatattgtttgaacatattcagagattgtgacttctcacaaatcaagtatagataaccatatcttgaaaaaccgtctatgaacgtaataaaatattgttgaccattccaagaggcagtagggaatgacccacaaatatccgtatgaattagttctaagatgtcagtgctctaatgacacctactttttttgtgtttgtctatttccccttaatacgttcaatacaaacatgaaaatcattcatatcaaggatccaagaatttcatcatccataagtctcttaattttcaatttagagatatgacctaagcgtttgtgccaaagggtagcaaaattctcatttaattttcgctttgtaccttgtgaactagagtgcaaaattttgttatcaaaagtaatagtatcaagcatataaaaattatcaattaaagaaccagtaccaataacatttgaatttagagaaagactagctttattattttcaaaggaacaaaaataaccatatttgtccaacctagaaatagaaatcaaattccgtctaaatgacagtgcaacataggtctcaatcaaatccaaataaacatcagcctttaataataatatgaattttccaatagcttctactaaaactttcttgtcatcacccacaaagatgtatctttcaatatcatttggcggtcggctccataggcaaccctgcatagacatacttatatgagtagtagcaccataatctacccaccaagtatctttaggtacacaagctaaattaacttcagaagaaacaaaagtgagagtcttacccttctttccacaccacgcaacatacttggaacattgtttcttcatgtgtccactcttcttgcaaaaatagtaggtaaattccttatcctgcttcttttgcttctttagcatgagtaattcatctgcagtatccttagctctcttctttttcttattatgagacattgatgccaagtaagcactatcagtctttctcgctgaagccttacttcctcttgcacatagtgagcaataagcttattaagagtccatttatccttttatgtattgtaactcactataacttgaccgtattgtgcaggaagagaaatgagaaccaagtgcacaagcaaatcatcagatagctttaactttagtgccttgagttttctagcaagattagacatctcaataatgtactcccttatgttcccctttcctttatacttcatggttacgagttttgctaatgtgttacttgtttccgctttttcatttttagcaaaatattgctaaacttctttgaggaacttcctagtatcagtactctcaataatagagccttgaaacacatccgaaatgaagcgtttcatgatcatcagactcatgcgattagagcgctccacttctctatataatccaaatttggatttttcggagtggaagtgagtttttccatccttagcgcaaggtctagatccatgcaaccaagaacaattttcacattctctttctataatttaaatttcattccgttcaacataggaatcatgtttacttgagcagcataattaacactagtagcagaaactgtatagagaacaaataagataacatatttagcatccatgtcataccaaatgcataattaaaacaaaatgcatatacatgacattaacaaacaatccaaactaatgtgggtccatttacaagacacctaatacaacattaacatttgatctttggaccaaaaatatcaatttgtaagtggtactctcaacgcaataatcaaacattgacaacaaatcctgtcaagctatagtcttcctttgtgccgaccactgcttaaatgaaaatttttataatcatcacatatttatcaccacatgtatatatatcatttgaccaaataataattcctttgtgccgatgattattcttatagataacaaatatactcatctttatatttcacaataaggaattatcagcaatagagattactttgacaacaatattgtttcaatcaatttattatgaaatataaaacaattaaaaacaataaataattaaataaacataaacataaacccaagatttattttattttattttattaaatgtctaagtttcttaattttattactcttaattttctaaatgagattatataataaaattacccaaattttattatcataatagattgaatatcatttctgataataaaattatcatttaattgttgacaataatatttaaataaaaaaattatatccaacatttaacgaaatccagtatataatgtgtttaattaaatgtttttaggcctttatataaactcactttttaggttttatatatataaccatattgttagataacttcggctacattgttatggaattaatctatacacatacgaaactcaagtttgtaattaacacgtattaattccataagtcgttggagcacaaggtaaaattcttgcactttattccataagaaacccaacttgtttgattatatataattataacccacagagacgtgggagcatcgatacaagccaaaaacgagaatttcgtgaagattgatataacgtgaacgacaaaaaaaaaaaaaaacagaaattgcatgaaccatattaattgacattttattagtttttataagtggaagagattcaaatttaagatatttttctcctctcttctcccttcagctcgctgttaatagtttgataaaaaaaaattaaaaataggttaggcctacattccatcaactaagaaaaaactaaaataacaaatatttcttcactggtgagaaatagacaaaaaaaaaaaaacacaattgttacatgcagtaaaggaaaaataaaatgggatttcaattgacaaacttttttctttataaagtaaaatatgttcatagttaaaagacatgaaatgatgaaattaattcctaggacgtaaaaattattaaaatgaattttatcttttctaacaaagttttatctatcgcatcgtctgaaaatcgaaattgtcattctttttaagaaacccaacttgtttgaattaatttgcaaacctatattagaatttagaagtcgggtcgacaaaacctagagatgtttacatactaatttttttccttcaccagttgtcgatctctgacacgtaaatcttgtgcccaatatatgaagaatgctgtggtcccatggaagaatatgggtcgaatgctattctattacaacaatgacgtttcccaagtgacaagttcagagcatctttatgagtatgatttcaagcccttcatgtctttaccaatctaacagagcatttcattattaaaaagttaataagcaccaaagcttctctctgaaaattgaagaaagactagaaataaggcttaattatgtattcacatatttttaagcaattggagcacggtaatgtgagtgacccaacaatgaatttatgagattggtaccatatttgatttcatcttaaactcgagccaaattagttttatggaattaaattaagccttaaatccaaattccttttcctagacaattaagaggatatttttatatcttaaatttaaatatgtattttatttcctaaaaatatgcaaatacatagtttcataatactaaaatatgatttagttcttataatatactagtttagtgtattgttccctatgacattttcttttaactcaaaggattaatgtagcgatataagacattattttgggtcagcggcaaccgcaaaccacgagtggaattagtctctcatccatttacttaaaagaacccgtagtgtctgatccaatatcaataaaagaaattcattagcaattatttataataattatacatgtattataattttttttctgcctacctattatacttattattaatattaatattatcattaaactaattgttcattaacatatgcaagtaataaaaaaagttaattgcacacataataatttatgcataattatttgcatataaaataatttcaaaattattatgacattcaaaaataaaaaaattaatctttatagtatcttctaattaaacatttcacaatgactcttatacgtaatcatgaaaattattgtatccatttttgtttcaaactaagttagaaaataaaaggcggttaaggaaagaaaaaatgataaaggaatgcatcttcaaaaataatgttgatttgattgatttatattttaaaatatatatttctatttttattgaaaaatacaaaattgtgtggtaaatgctgctattataaattgttatatgaactgaaggtagctatgatcagtttatatttgttatttcatgggtcaaaagtcacaaatattttctaactcattgtaatttagtaagtaaaaaaatattttaaatattcacgaaatactcaatcattccttttaaaaatatttatttagtctaaagtaattaggagtagtatatattttaaataggattagttaatcacgttaatatattttgattcaaaattacaatgtaatgtattcaaattatgatgaaatataaataatttattgacaaaacataaatttaattcttattcagtcaaaaataaatttaattcttatttttattatttccatatctttttaagatataataattaattgaatcttcaactaactatttatattatacaataataattaataatttaaaaattattatatttataatacattattgatatttagcacaaaaatattagttttagtttataatttttaattcaattttttaaaaaaatttatgttaaaatcttaaaatattttatattatttttcatgaactaacatagatattgtgaatgacacgcttgaattaaagttttaattttaaaatataattaaaatatcatttcatatattttttattttattttttattatagctagcaactctcggtgtagattgttaacaatattgattttcaataattatttaaattgccaacccacttaacatataattaattattattttcttattgtatttttttaaatctactagatatataatcaactattaataataaacaacaataactaataactaataactaaatgattaaaataaataagttttcattacacgtgtcaccacactctagtatgtttattataaaaaaataaaaatgcatttattaagacattaataattacatataatcctcccaatattctctcagtactttattttaaaaaatattaaaaagtctttgtcccaaatcgcaatcattgcatatttgagagaggtttcatttttttcaaacccctgctcagctaatggtgagtcaaaaaggcaattatcatcctcctctatataaaggggggtctatggtgaaggttgtcaatgcaatagcaacaaaatccaatattcaccatattcttgaaccaaattaacaagcaaggctagtgtactctacttgcaacctgaagccactaccaagcatcataggaagatggagaaaaacaaagttgatgaaaatcctgaagaatttaacgatgagatgaaatgggttcgtgattcttcattggatcacaaaggaagacttcctctccgagcttcaactggttcttggaaagcttctctcttcatcattggtaaggaatctccatcttcctcttacctaattaattaattttaacccatcatatgttatccattaattataagttcttgatataaaatatctatcagttttagaaatgattaatttttgttaaaaatttgaataatcacctttaatataatattttttctcaatcatatttttttatttacaaaactcaaattatataaataagtcgaacccaatttcacactaacttcttgatttttaatgcataatatataatatagtagtcaatatcttaattaaaattaagagtttattaattttaataaagaatcagttaaaaaattaaattaattaactaaaatgcattaattaacagtcttaaaacaatattggcaaaagaaatacatcaaagttaaaaattttaaatttaattaaaatgcattaattaatattatcacctctagtatgattttatttttagaagatctctagtctgatcttttcttggttttaacacatctagtgtaattttaacgcatcatcttttttttcgttaatcatatattttttattcacaaaactgaattcaatttcacttgaattaatgttttctttgtttataaataatatagtagccaatattttaattgaaattaagattttattaattttaatgaagaatccgtaaaaaattaaattaattaattaaaatgcattaattcgtattgggtttcattaatacaatttttatttaatgaaaaataaattattaatatcaatatatagatctaaactaatggtataacacattatattaacatatattatatatcgaatattaatataataccttagattatcaaaatagactcatgatattgatattaattattaataagagtaataatcccttacattcaaacacatcaactgcatgtttctcattcatctttatatctttcttatgtgatattacattactaatcatgttaataattttttttcccgagtatttacacccctttagtgttcacaatttttttctaataacaatttattttttaaccatgtacaggtagaaataatacaaacatatgattctttatttctttctactaataacgacaactacttgttagtgcttatgatcaagctgtgtagacctatttgcctttcttatcctcgaatttgcggcagtatatatatccatacatacttatattcagccgtaaatggagtaattattgctttaatttattattaaagtaattattactttattagcaatatcaattaatacaaatcaagattattttgctaattgggatagtacctatggtcagattcccatgcactaaaatggacaagggcagtaaggcataaaaagcggtgggttccactacctacaactagatatattttaacagcattagtagtagagataatgaatatgagccacgcaaattaggcattatacattcactattttactagtgagaaagatgctccactccctcctgttaaactaagtgtgaattagataatgagtgttattttttagaggacaagtaccgtaggctgtatttaaattcgaggttaaaatatggaaaagcatgttgttagggaaagttaatcttgtaaatgaatctcgttattttaagagaataattcttaattttttatctacaaatatctgacttcactaaaaaaaatagactatttagtagaatatacatataatttatcataacaaaacatttttttaatgacttcggatatattaatttttttaaaaaattaaaacgacacgttttctttagattatatggaaaaatacttttacatagaagattctaaacaatgacataatatttaaaaaaaaactttgattcatttatagattttttatgtaattataattattaaattttgtaataactattttgaaagttgatagtataaaaaatttagactaaaattaaaattcaactcttacgaaagagtcctttcatatatagttcataggctgcaaatacggttgggccgctacatatagcttttatattttgtataaaacaactatacagttaagtaaaatttgatatcaatattttattacattttcactatttattatctcttaaactttttactttttagttttaacgtactcaaccttttagaataaaaagtttattattcctagtttactccatattgtgtgtgccaatatcagttaacaaataccgtacctgcctgtttcttgttcaattaagaagctattcgaggtatagattaggggattaatggttcgggatgcttgttccctttcgtaatttttatcttaggatcctcctagttatatcttttatacataaaaagcaaagcaaaaattgaaatcacttaaatttttacgttgaaacgatttacttgaatttaatatagttaacaattactcgtttagctggtccacaactagccatgcatatattcataaactttgatctcattctttccgataacaataataatttgttgagaaaaaaaactttacactataaaattattttgaattattatttaatgatttgtgattgaatgtgttttacactataagtgtatcactattaaactttaatttgtttatattaattatgttttttttttccttttttcgcagcaattgagtttagtgagagattgagctactttggaatagctactagcttggtcatttaccttacgaaagttcttcatcaagaccttaagacagcagttaaaaatgtgaactattggtctggtgtcaccactttgataccattgttaggaggattcctagctgatgcttacttaggccgttacaccactgtgatagcatcatgcattgtttatctcatggtaatcaatttcaaatctcaatcaccattcaattaagaaattttatatcatgaacaaaaaatttatatacatcaagcttaaaagaattatatcatttaatcacaaattattatgtataataaatttattaatttatataataattttatgattaaatgataatataaatttagtttaaattctcagtatataattattaaactcttgtattgatactgtcatccaacatcaaattatcatatataataaatatattaacttagaataactttcttaaaaatcacattaattataatttgtgattagatgacagaaaaaactgttttaccctattagtgtttattcattaaactcttgtaacattatcattattaatttattatatatttattaactattaaaaacttgtttttgtttggcaaaacaacacagggtttggttcttctttctttgtcatggttcataccgggtttaaaaccttgtgatcatagtattatatgcaccgaacctaggaggattcatgaggtggttttcttcctaggcatctatttaatatccgtaggaactgggggccataaaccttccttggagagctttggtgccgatcaatttgatgataataatgccaaagaaagaaggcagaaaatgtcctttttcaactggtggaacagtggtttgtgtagtggaatcattctaggagtgactgtgattgtgtatgtgcaagaccatgtcaactggggggttgctgatatcatcctcacaggggttatggcggtctcattgctcatattcttgattggaaggtcttcttatcgttacaggacaccaattgggagccccttgactcctatgttgcaagttattgttgctgctatttccaaaagaaagcttccatatccttccaatccaactcaattgtacgaagtttccaagtctgagggcaacagtgaaagatttctggctcacaccaagaaactcaagtaagtagtaaaacaaaaacatattacattgagaaagaaaggccaatttagaagtgtatattctaatatatgacacatgttaaggaggtaaaaaaattatctatatagaaagtaattttttatattaaaaatacgcaagtcatttaatatttatcttttcaagtaactaattaaaagtattcaatataacattttgaatactcctcgtgaatcatgacatgcacttgccctcaatttgaaaggactataaattgaatttaatgataatgtattaacagtttttttatattgttattcaatcataaattattgttgatatgattttaagataattctataaaattcaacaaacgtatcataaatgatgatttctgattgaataactgtgtaaaatcattttacattctcaatgcataatctcttttctcatataaactaagtaatttgttaactagtttctatactagttaataagtattaaatacatcatactaaatacttaaattattttaaaaaataaattttgaatgatttttctgttttgttataatatatattttttggacaaaaccttcataagtttagtattttctaactaatgttctcattataatggttgcaatacttaccatatgttaattataaattaactgatggtattatttgtttgatcagatttcttgacaaggcagcaattcttgaaaatgaagggaacatagcagagaaacagagtccatggagacttgcaacagtaaccaaggttgaagaactgaagctaatcatcaacatgatccccatttgggtgttcacaataccatttggaatctgtgcttcccaaacctccactttcttcatcaaacaaggtgccatcatgaacagaaacataggcaataatggatttgtggttcccccagcatcaattttcactcttgcagccattgggatgatactttcagtgatcatctatgacaagctctttgtgccagtgctaagaaaactaacaggaaatgacagaggaatcagcatcctccaaaggattggcattggaatggtcttctcagtcatcacaatgatagtggcagctttggtggaaaaaaagaggcttgcggcagttgaaatgaatggcccattaaagggttctttgtccatgagtgccctttggttggccccacaatttatgatcattggatttggtgatgggtttgctcttgtgggcttgcaagagtatttctatgaccaagtacctgactcaatgagaagccttggaatagcactttaccttagtgtcattggggctgcaagtttttttactaatttattaataacaattgtggatcatgtcactggtaagattgggaagagttggattggtaaggatttgaatagtagccggttggacaaattttattggcttcttgcagccatcactacattgaacttgttcatgtttgtgttctttgctcgcaagtataattacaagaatgtgcaaaaggtggcagtggctgattgctatgaaggaaaaagtgatgatgatggaccagagactagggtttgagttagtggaattcagttctatgcagcttaattgacaaaaggtttcatcttctgattatcaatatatatatatatatacatatatatatatatatatatatatatatatatatacacacttttatactattagaatccttaagttttatccttagtatagcgttaaaccaagagtttttgtttgtttcagttgtttatgcctttatggtgtccatgtaatatgacaataaaattatgtatgattatcatttcaaaaggagtcattcatgttttcatcttattatctcgttttttgggatggtcttgccttctttttttttttacctaccttaacttcactatcttaaactctgcagagtctggaatgacttacaaatcatatatttgcctctcttcggtacactaacttttccaatcaaatattataataataaataaaaaactataagttggttaatttttaaattcataaattgatggcacaggaaggggaaaaaatcatcttccatctggtattaaaatgatatcacctagagaataaagatatactataaaaaatagcatgctttgattttacaaactatggtttcatcaatggttataattaataatcttttactttttttttattagtcagaaagacatatacaacgaacttggatgggtaaagaatagagaaaatggttagtatatccgagccctgttgttaaatttcaagcaccttggggattattagccaataatacttataattaggggtgttcatcaaccgatccaaaccgattcaaaccgcggtgaccgaaccgaaaaaccgaaaaccgaaataaccgaaaaccaaaaaattgaaaaccgaaaaaaaatcgaaaattttcaccggattggatcggtttttggattggccggtgaaaaccgatccaatccaaaccgatccaattgtaaaccatactttaccctttatctacttgggcctattccctatcatagcccaaaaactaaaattccaatacattgctccttattttgtccaatgaacgtgtttgtctaatgaaaattagacaataatgtttgtttttgtccaatgaatgtgtttgtttatgttagatactccttattttgataaaaataagtctcataagttttatttttagactttttaaaaaaccgaaaatcgatccaatccaaaccgaaaaaaattggattggattggatcggatttgaaaaaaatttcaaaccgaatggatgatcaaatgaccaaactgaaggaattggatcggatgattttttgcttcaaaaccgatccaatccagaccgcgaacacccctacttataattacaccttcaacaatgagtgataatatttgagatggggacaaaaagaatgattcaaaagttataatatttcatcccattattttcaattttatttataatataatttttttaggaattatgcgatggtcattaaataactattttaagtgccaaattaacataatctttacataattataaacagagcagagtttgattttttaagtctatggcgcgtgcgtgcttcaactgcattgcctcaatctaagcagtgaacattagcaacttaatggagagaaggcaaagtataagaccaaaactccaagccatcagcattatctgcaaggttttaaaaaatagtcatgatacaagattttataagcttaaacagtgagcaaggttttaaaaaatagtcaacaaccgttcaagattttgtaattatctgcaatcatgatacaaatgtaattggagccgtattaatcacatttgtccgtgatttgtcactatatcaacaaaccaaccaatatttaaaaccttgacagtgggtttactaagctattccttttccatataaactatctttattgtgagtcgtaataattagttggactcctttttaccccaagtaacttgttaattcattttctcttttttctcactaggtatcaaataatttcttggtatctactaatcatttttgtaactatggtaattagaaattggtaattgaaacaagaattgagaaatataaaaataaaatgatttttcatcaagatattttaaatattttataaaggaaatcaaactagaaacatatttgaatttgggagttgattataggttataaaatgttaagaaaatatattttagtttctatattttcggccaaacatagtcaaattttttatactctcatatcaatgaaatttttcctcaaactttaaaatatacatgtatactgaatttatatgtttttttaaaaacaatttgataaccaaattcatcaatatgaaagtatgtaggtacttttgaccatatttgtctaaacatatagaaattaaaaacatattttttctaaaaaaaattgatatcttatactgccgattctagagtcgttatattaaattaactgtacaaatttatgataaattaaaaacgattatttcaaccctaaaagaaggaaaaataaataaaattattttcaacaaaaaataaagttaggaaatttccttctttttcaacgtctggtcacgtaataattttatataataagtttcggtagattcatttattgacgtccaaaattgtatttcttgaaagttaatttttttttaacaatgacattaatttatgaaattttaattttaattttaaattgagcattaatttttctttagaaaattgaaaatttagagttctatgaacttaaaggaaaacaatttaattcatttcaaaagtttaattctctggatttatcttaattttagtaaattggggtgaaaaaattagaatatagaaaaggacttttaaaattttatttttattattgttacttgtttaatttttttatttacaaattttagcaattagaatgttatgttaatggaaaattcaaatccataatcttcttatccctccaactcttaagcccctccctctctttttatgacacaaattaagaccctctctctaatcaccaaaccatctataaatcggttcaaattttagaagtgaagaatttaatttttgggggatattatattttaaatttgactttagcaatttagagtcattcccttcttccgccacatttgatatattaacataaattgttgaaatattcatttgggtcattcatacgtatctgatgtatgtccaacaccaggccaagttattttgagttgcttttggttgtatgattcatgtccagccatattaacgttttttttttttttaaaaaaaaaaaacgtatttcctaacttgggaacagcgtgttctgggtctgtttctcataacccagaattttctttaggctaaaggaaattgctattggcccaatgaattttgttatttgaacttattatccctcaaaatttcaaaactattcatatgccgaatgcactattctacggtattagggggtgcaaaaactatgcataatggaatcacgattttattgtgcatagttttcacaccttatgttatgtaggggaatcacaattatgtaatgcatcttgttttagaaaaaaatgcataatgaaatcacgactctcatatgcaaggggaactggggtaaaacatattgtacaatggaagtgtgattcaattgtatgatgtgtaatgaaatcacacattcattgtacatttttatttaaaatagtttggcatacagaaatgacgtattaaataaaaggctaaaataggtttgtcatccctgtaaatatgaaaatgtttgaaattcgtctctgcaaaacttttagtagttttttgttcttacaagatcaaagtctatgatattttggctcggacgtaggtttagttaactccgaacctatgatattttattaaatttcaaattgacaatttttgggagttaaaaactatcacaaaatgcacaaaaatgctacaaaattctgggactcgagttcttcgaacccagaaccccgaattaacaaatcaaaccacaatcattgaatttgggatgtgaacaccttcaccacaaatcctggaactccaaattgaaaccctgggacaacctttgttggaacttgacaagaaccttaacatgctcctcctcatcacgagaaggttgttgttcttgatgtgtgtcaacgagatcacaaatgttgaggttaagggtgtacatagtttggattgggttaagtttggagaaactcatcacccaacccaattaaaaattttcaagttgggtctggttctagtgattctactgccaaacccaaccaatccaacccgattatgatcaggttggtcaatttggtcataaaatttaaaaattaaaaatttcagaacagatttttgaaaacaattttcttaaaaatgtataatataattacatagaatatgtaattttgttgtatatagaaatttcggatttggattatttttttgtattaatattttttattttttattatcatatgaccggatttggttgggtcacgggttgacaattcataacccgtttcccaacccgaatataattgggtctatattgggtcgggttgggtttgactcaaatacttttgaaactcaacccaatataattgggttgagttaggtcaagggtcaacccaaacctgtgaacacccttagttgaggaggtagattttgtagttggtgacatgcagtagaaaagggatcagagggagtatccgtggtgcttgtggagtttggagggaagggaggatgtagagggtttggtctgaggagtggttggagtggatcttggctttgaggtcaaaaagaatattgatggtggcaagggaatcgattctagaactttagaacccaaatagcaagagagaaacaatgtgctaatttggcaattcctcttgtgccgctttgatcctaacttcttgtcgttgccaacactcaaaccttcgtgccacaactatagcaacatcgacatagcacaaatctttgttgcttcattgcgcaatggaaacatcaacaaccagtatggtgcagacgctgccatgatgcctttcccatcgacctcgctacctacgaggacgttgaaaataataagaatactcacaataaccaagaggggggtgaattggttaaaaccttggtattttaaaattaattcaaatcagagtttaagatctttatcactttcaaaaccaagaaatctttttactcaatcaaataactcagcccctagaaatcaattgctcaaaacagaacttgttggacaatgaatatgaatcaaagaatcaatgaacaagatgagtaatagagataaagaaacaaaaacacaagcaatttatactggttcacttcacaacagaagctacatccagtttcttctaattcacactgaattaaagttccactattataaatttttgttcttacaagcttttacaaaacctcctttatcaacactagataaagaatagaaatctaaaaccctattagacttctaaagagcaagaaccagagaacactactctgttctttagctagaaaacccttctctagacccaagcaagaagaacccacttacaatagccaattacaacagaaattcaaaacgaatttacaaacaaagattaaagagagagacaacctgatgatccaatgaatgtaatgcacatgatttagcaagtcaggttgaatagcaaacaaaatcagaacatgtttttccttaaccttgaaaagtttcttgttcaagaatcattcaaagacccatgaatgttttgaatgaagcaagaagtaatagaacccagaaaatcactttgaaagacttagatgacttgtgtatactcagaaatacgaagtggtcaagtcagaaaacaatccaagccttcaagcttatttataacaaatttagtaactaactataattgattaaacgccccagataatcaattaaaacgcttatgtaatcgattaaattatcacttaatcgattaaaatgttcaagaaggtttctgggtttcatcaatgagcaaaataatagattaaactgagttgtaatcgattaaggcagaaagttcagtttcacaaaatgaactgtttaatcgattatgagtttttgtaatcgattaagtcagaaaattaggattttcaaaatgaactatgtaatcaattacggatgatggtaatcgattattccaataaaacttaaaatctgttttcaactatgtaatcaattacactatgtcagtaattgattaaaatatttaacaaagcagttcagttttaatcaaaggccaaataatcgattaatctgataggtaatcgattaagttgttcatgaaggtttttccagattgaacaaagaacaaaataatcgattataccattaagtaatcgattaaaacagtgaaaaatcatttttccaaaaaccttttaatcagattaaatccttaaccaaaaagataaaagctttgatgttttaatgaaaaccatttaagcttgttaatggatgaatgaatgcaatgcaaggatcaacaaattgtctttctcttacacttgattcatttacaaaacttcaaggcacttcaagcatgttgaaagctcaaaacacatttctgaatcaaagtctttcactcttcatgatgctccccctatatccaacagacgttgtcgccgagaatgggattgtacaattaaacatttgctcttattcttcatttttgaaatccaatgcaagcaaaacaatcatcaactttcttcatttcattcccattatttatgtgttgtttaggatcatgaggcaatacatttatgtatgatttctgagtttatggtggaaactagcctcataaatcaggggttgcattgaaattttaacttagccttatggaatgcatttgttttgttttcatgttattttttacttctaaattgtgaggtatgcatcaaatgattgtggttttgatttttgattttgggattgtgggctcaaagaagatgaggaaggttagggaagaggagttcaaaaatttgtggcattttttttttcatttgtgatgatttttaaccctcagaaatcgtttttaaaattaaaattaaaatcataggtttggattacctgaaccgatgtctaagctaaaatataagattttgattttgtaaggaagaaaaactactaaatttttgtagggacgaattcctaacattttcatatttacagagatgaaaaatattttgggctaaataaaattcatagaaatgtcaactacatattgaggtatacattcataaaattaatggatatacattcaatgtttatcatgaacaaaatgtctactatgtgttttcgttgtgttgtaaaatgtaatgcacaaaggaatcttgatttcgttgtgtaacaaaatctattatagatacaacagattcgtgatccattgagtaaccaaaacccaaagaaaataaatagaattatgattctattgtgcaaaaatgcacaacaaaatcatgattatgttttttctacaaaaacaaaaaaagtacatgtgtgcaaagagggaagagagggaaagaggaaaaagggagaggagaatgaagaaaatgaaggtagggaagggtagtttggtaatttctcttggctggtaggggccaagagcaatttagtttgggccaatggtaatacccttggctaaaatgtcaatttgattcatttagttttcacattttttttgttttggtccttttatgttttcatagtctcattttagtcatttatgtatgagaataaaccaaaaaatgctccttttgtccattaaataatgttgtaacgttcattttattattattttatttcattttctaatagctcatttttttaccattcaaaacaataaaaaatatttgtatgaagcatttaataggtattaaacaatttttatggttaaaaatcgccaaaaattaatatatcccaaatccaattaaatgggagttaatacacatgcaccctaggaataaaagtgcaaatatagttgtcaggggaagaagatcagataatgaccttagttctagttagatcaacccttttagggagaaaagtggagagttgacatagtaacaagcaatgatatgaaattctctcatacccttaggacaagtcgaatagaaatcgatggagattcaaatttggtggtatttgaaatagggagaagacaaagttgagtatgagaagagaaccatagtaagtttcccagtgcaaaagcctatataagtaaactccctagtatcacatttcctatgtagacacctaagctaaagaaaccacctccactataggttatgcctaggagtcgaacctttaataagggcaagatgtcgtgatgggtaaccattaagtggaaaaatcctactgtcagagtatcagttctaacataagagtttggaaagtctttatgataaaaggttatccaaagagcataaagatctaaaagcacttcatgagttaaaggatccactgacaaggtccaaagccaagcttctacagtaaaagatgaccaagagaatcaaggatgaactactcattaaaggcaagtaaggaggaagccagaaggagttgaattggagcacattgaagattgttgaatagctcgcttagcgcgcatgtcgcgcttagcccaattcattttgtaatttttgtagtttttataatttcataatttttgattacttgtttaatgggccttaatgttgatgtaaataggtctaaactgtacattttagtgtgttaatagaggtttagctttataagtactcagaaactcttcatttttggtaactaatttttgaatgaaattgagtttttgcttgaattgaaagtttaatttcttctttggttattgacaaaacccaaatttgatttttatcaaagaaactttcctttgtggcgaatcctcctccgacttatcgttcctccacggatcatggcgtcattctttatcaccttcctcatcttctccattttttgttttgaagttctatgcaaccatcaatggagtcttgaaaattacatctaaaacggtccaatccaagtgttcatgacttggttctcatcatgtggtaatcagagcttgaatccggagagtaattaaaaaatatttctatcaatttaggtgtagttttcattttttttcccataaaaataagaaaatgaaagtcctttgtttcttgcttgtgcgtgttcatttgtgtgtttttgagtttatcattcatttgccttcaattttcctatctttttgttgaatttagagttgatttgagtatgagttgttcttcacgttcttcctaaaactcatagcactgttggaaaatttctgagtttgatccataacaattctgtttggagagcgttagggtgttagtgcaaatataaaaagtttctggtcctaaaatagaaaatacgaaggaccaaagagcaaaaattttaaaaatattttggggtcaaattgaaaatataaaaaatatgaggacctaagagtaaaaaaaagctacaatcaaaatttaagagcccactctcctagtgtgtttttattgttgctttctagtattgtctttttgcataattacaatggtatatacttagccaaattttttttacaacattagaggagacatcttgcatattatttttatatcatcctatttgctttttttttttcattccttttgagttgtactttcttgttgagcttttattgtttgttttcttgttgagcttttattgcttgttttcttgttgagattttttagataatccttgaattgaaatctttggttcatttcaaaggctaaagaagagttagagagtgaaaaaagacaaaagtgaaccttatagaagaaatcttataagtgtgaaacacgagtgttgaaaagtgtaaacacttagtgcgtagtaaggtcccatattctttttttgtttttgttttactaaccttttcttgtagcaatggtgtctgaaagtgatagtgatccatctttccctagatctgataagctaatagcttcattggataagcaaatggataagttgcaaagaaatgttgagaggaggatgggagccagatttgatgcaatacaaaaatgcactcaagagttgagtggaagaatggaagacatagagaggagggagcatcatcgatcacctcattcttctcaagggagtgatgatggctatgaagatggtagaaagcatcgacataggaggaatagggatggcatggataatgtgaaggtaaaaattcccaagttcctaggtacatatgatccgaaggcttacctttactgggagttgaaagttgaccaaatttttgattgcaataattttagtgaagaaaagaaattgaagttggctagcttaaaatttaaaggatatgccttggtgtggtggcatcaaatccaagtagatagagaaagattgagaagacatagaccagacacttgggaggtaatgaagagaatcatgaaggagaaatttgtcccacctcaatatgtaagggaaatgcataacaagttaaaaaggctttatgaaggaactaaaagtgtagatgattattacaaggagatggagatttctttgataagagtaaacattgaagagactaatgaagctacaatgactagatttttgaatggtttgagtagggacattcaagatgttgtagagcttcaaagctacaataccatgtatgaacttattcatagggctgtgaaagtggaacaaaagttaaagagaaaacaagcctacaagaagtctttttatggttattcataaggacacttctaagaaggagggttcttcttcacaacatattgaaatgaagttttcaaggggtaatcctacttcttctactcaacccccttccaataaatctagttttgttaaatgttttaagtttttggaaaaagggtcacattgcatcccaatgtcctaacaaaaggaccatgattgtgacggagaatggagatgtggatagtgagtcatctaagagttctcatagttcctctagtaaaagagaggatgctggttttcttcaatcgaaagagagaaatcttttgatggtaaaaagactcatgggatgtttgtgcaaagattgagatgatacacaaataaaaaagattttccattttagatgcttggtgaatgcaaatgtttgttctctaatttttgatggaggtgaaaaacaaatgaatacttaaaacaaccaagaggggggtgaattggttgaaaaactttgcccaattaaaatttaaatcagagtagccacataatctttatcacttattagaaattcttttgataccagaaatcaattttcaatcaactccccttttcaagaatgcagaaaacagagtatctcaaactgtgctttgaatatgattcacaaacaatgtaataaacatgtaaaactgagaaaattaaagaacacatagattttatactggttcacctcaaacactatgaggctacatccagttcttcactcaaaactagagagaagttccactattgcaaaatattctttacaagcaaaattacaaatctctctttgtcaaccctagacaaagttcagcaatctaaaacactattagatccttagagatacccctttcaacctgagaactctacccagttgaaaaactcagagaaacactatctctatgcttgaaagaaacccattacaatagagttacaagatttcattattacaaataaattgtaaaacccaatcattaagcaagaaaagatatcacctgataatccattaatgaatgaatatgaatgaatcacagatgagaacgcagattattacaccacagatatgcagcttttcttgactttgattgaaagtaaaaacttcaacacatgatcttcatgagtaattgattctatgaagcttctacaatatttctttctcagaattttatcactaatgaaagcactgattgtttgtgaatgatcactcaacgaaaatctcaatagcacttgttaattctcttcttcatattttctatcgcagtgacttctatttataacagaatttttaccaaaaataatcgattaaataagctcctgtaatcgattatttcgactatgtaatcgattaatccaagatggtaatcgattaaaatgcttatagctcgttcaagattccaagaacgaatagtttaatcgattaaaccgacacgtaatcgattaaaccagtaagttatgatttttctatttagaccaattaatcgattatgatttcctgtaatcgattaaaaccgaatgacagtttttaccaaaacatatgtgtaatcgattaaaatatttggtaatcgattaaggcagtaagaacaacttttcaatgtttgcctttgtaatcgattaaattattgagtaatcgattataacgatcatgtctagatttcaaaaggcagttagaacaaaataatcgatgtcaccaacctggtaatcgattattcctgtgaaatattatttttccaaaaacttaaagccttttttaacttttctaaatgattttctttgattaatcccactaacctaataatcctatatgtatgaatgatgcatgttatgcaatattggattatcagatcatacattttcttttacatgatcaatttgaacttttcaacttaaagcttccttttgcatgttgaaagcacaaaactctttactttgatcttcaatgatgcttggcttcatctgaatcaacaatctccccctttttgtcttttgacatgccaaattctcaaaatcttcaaattgattgaacatgcagtcctgtaatatccagtcttgggaaattccttattcttcaattgattcaaataaacattttgtttcagatcatctttgatggagctttacaagtacctgtacctttcaacattctttccagaaatcaagtgttaaaatattcaataatatttaaacattcaagtccagatttgatttcaaatttctccccctcaattatagtatataacaatcaattcttctagtaaaatttaattctcatttaattctccccctatctttttatttcagaatttttgttactccccctgaattattacaatcttatgaagttttgatcttattctcttactcttattctattttgaattattcttattctattttgaagttttgatcttattctccccctatttggcttgttaaaagtcaaaaacactaataagcacaatgatcaaatagagaatagagaataaaaagtataataatccattgataaagcaattacagagagtaaaatagaaagagatcatacaaactctttatctgaattcttaacaaatagaaagcagatcatataaactttaaaacaaaatccaaatctagtgaatggtatatcagacaaaaactaaatctaaggtgtacttaggaagcatctaattctgttaggccctagatattagattcttttaatttgtctttactatcatgattctttagccaaagaaatcttcttgaagcaccagcatgatctcagccttgaaatccttttgaaaggatggcattccagacttcttctagattttcttatccttttgtaacaaggcttaggcattgtgtctgaatagaaaagatgacaaaggcagagatggctagtgatgcaaattcagaaggctgtttatcctgtatttataggctggattagactctataagtctctaaaacagtccaaattcaaaggtcataactgatggtacgtgtttaagagccttgaattcagtttcactaataaatgaccagttatgaatttcataaaacgcgtcagaattcaagcaacagatcaaataattgattattacgtagtgtaatcgattagttcagttcaatttagctttctgttcaaaaataacgtaatcgattaatattttcaggtaatcgattctttttatcaattatcagaggttgaagacaacctgtaatcgattctttttatacagtaatcgattattttaagtatagtcatgaaaacagtgtattagaactataagtaatcgattatctcgtgtggtaatcgattaacacagacagtttatatcaagtcatgtacaaggtaatcgattacagcttttcagtaatcgattattactgacttgtctgcttttgatttttgttctttaacaatagtaatcgattaattcaaagtgtaatcgattattccagagagttttatcttctgagaattagaagaataatcggttacctttgtttgtaatcgattacaaacttacaaaattcattccagtatagggctttaaagtatttaatcgattaatacgcagtgtaatcgattatctcagggcattttacaaaacagagcagtttagcagcttatttctcaatttactacataatggctatccatgatttatcaactcttcaaatagcacataagccacaaacaagataagctagttaagattattctcatcaagaattcctagcatatttcttagtgtatagaatctatctctagcaagtggttttgtgaaaatatcagctaattgattattagtatcaatgaagtctacctttatgttacctttttgaacttgatctctgagaaaatgatgccttatctcaatatgctttgtccttgaatgcatgactggattctttgatatattgatggcacttgtattgtcacacaacagtggtattgcattaagttccactccataatcttgcattttctgcttgagccataaactctgtgcacagcaacttccagcagatatgtattcagcctcagcagtggataaagcaacacatgattgcttcttgcaatgccatgaaataagagagcttcctagcatgtgacatgtaccactagtgctttttctgtctaatttgcaacctgcaaaatcagagtcagaataaccaactatatttaaagaagcacctttaggataccaaagtccaactcttggtgtagctttgagatatttcaggatcctcttgacagcagtaagatgtgactccttgggattggattgatatcttgcacatagacacacacttaacataatatcaggtctgcttgctgtcaaatacaggagtgatcctatcattcctctatattttgactcatcaactttcattccatgctcatctgaatctagatatgttgatgtagccattggagttgcagcatctttacttttctccatttcaaactttttgataatttccagacaatactttgactgattaatgaatgttccattcttcatttgctttatttggagaccaagaaagaaggtaagttcacccatcattgacatctcgaattatttctgcatagctgatgaaaaatctttgcacaacagatgattagttgatccaaatattatatcatccacataaatttgaaccaataagaaatcatttccaagccttttgataaacaaggttttatcaatactgcccctagtaaaggattgttcaagtaaaaacttgcttaatctttcataccactgtctaggagcttgtttcaatccataaagtgcctttttcaatttataaacataatccggatgtttaaaatctttaaaacctggaggttgttcaacatagatttcctcctcaatatatccatttaaaaaagcacttttaacatccatttgaaaaagcttgaaatcaatgagacatgcatatgcaagtaacaacctgattgcttccaatcttgcaactggagcaaaagtttcctcatagtctatgccttcctcttgattatagcctttggctaccaatctggctttgtttctaactatgattccactttcatcaagtttatttctaaaaacccatttagtgccaatgggtttaagagatgatggtctaggaacaagttcccaaacttcatttctcttaaactgatttaactcatcatgcattgcatgcatccaatgttcatcacataaggcttgttcaatgttcttaggcttttgtgaaacgaaagccatatcacaataaagatttttaagtgaagatctagttgatactccctttgttacttcacctattatgttgttcattgataagtctcttgttgttctccattcttttctgatttgaactggagttgtggattcattttctgcttttggatcttcatttttgacagaggtatctttaacttctgttatttccagctgacctgcatcatcattttctttttcctccttagaggtgtcagtctcatcacaaatcacatgtattgattcttcaacgcacattgttctcttgttgaacactctatatgccttactatgcaatgaatatcctaggaaaattacttcatctgccttagcatcaaattttccaagtgattctttcccattgttcaacacaaagcacttgcagccaaaaacttttaaatgagatacattaggctttcttcctttgtatagctcataaggagttttctttaaaatgggccttatgagagttctattcaaagtataacacacagtacttactgcatcaacccaaaaatacttaggtaaattagattaattaagaagtattctagctccttcctcaagagatctatttttcctctccacaacaccattttgttggggtgttcttggagctgaaaaattgtggttgattccattttcttcacagaatttttcaaaaagatcattttggaattcaccaccatggtcacttcttattgaaactattttactacctttctcattttgagtaagtttggccaattttcgaaaagcaaggaaagcatcacttttggatttcaaaaacatagtccaggtatatctagagtaatcatctacaatcacaagtccataatagtttcctcctaaactcatagttcttgaaggaccaaataaatccatgtgaagtagttcaagaggtctagaggtggaaacaatgttttgcctttgaaaagaatttttagtttgtttccccttttgacaagcatcacagattttatccttctcaaacttgagtttgggtaaaccaatgactaattcttttcttatgagcttgttcatgtgattcatgttcatgtgacttgctcttctatgccacagccaagtttcatccaatttgctgataagacatgaagatttatggaataatgcatgatcaattgaaagcacataaatgttaccttttcttttacctatgtgcagtacctcactgtctttatcatctgatattatgcagctatctttgttaaaattcaccttgtagcctttatcacaaagctgactaatgctcaacagattatgctttagcccatccacgtacaacacactttttatcttggtttttatgctgtctcctatatttccttcaccaataattttgcctttgttgttatcaccataagtagcatatcctccttcttttaatgtcagatttgagagaagggacatgtctccagtcatgtgtctagagcatccactgtcaagatatcaaattgatgttctagctcttagacacacatgcaaaagcaaatcagaattttattgaaggtacccaatcaaggttgggtccgtatgggttagcatttcttttgatcttaggaatccagatgcaattaccattaggcacaaagaatctcctagcatagcatttaaaagaagtgtgtcccttcttcatacaatagttgcaagtgacagattttgaagatttttcaaatgcagcaaattgattggcccttatgccacttttgattcttctgttttggtggtacaaaaactgttttcccaaatgattttgttccacgtttgtaccccaatccagaagtatctccagcatacttttgcacacttaacatttcagctaagttgcatttgcctttataaaacttcctcaagagatcaatcaagtcactatttttggctaaaagcaacatatatttttcaccttgactttgtttgtattcttcaaaatctttcaaaagcattctatacttgtcaacattggttgatgaagaagcacacacacacagccatttaatttgtaacttgaaatcagtttttcattttcttctttcaagttgcaaatttcattttgcaaatctgtaattttttctatatgccatctaagatttcctttgagcttattattggcttttgcaagtttttgggcttcctcatacatctcttgaaaagcatgaatggcttgatcaagttcagaattcacctcatcttcttcactgagtagatcatcatcatcttcatttatgatggatgtaaaacacaagttagcttcctcttgctctgctgaagaatctgaagtggttgactcattatcttcccaagctatgtaggctttctttcctttagcttctttctttgcctttccttctgcttgttgcttcctcaagtaaattgcacattcagacttgatgtggccaggtttgccacactcaaaacaagtaaaattgttgctgctgtttctgttgcctctgctgaatcgtttattcttgcctttcttcagaaatttgttgaattttttaacaatcaagttcacttgctcatcatcttcctctttttcgattttgcttgctgcagccttcagtgctatgcttcttgttttcttctctgcatcttcacaaaatgttagttgtgacatttctaattcatattcaagaagcttaccaaacaaagctgccatggacattttagataggtccttcgactccttgatggctgtcacctttggctgccatggtcttgttaagcacttcaaaattttgatgtttagctcctcagtatcaaatactttgccaagacccagcaagtgatttactatatgtgtaaatctggtttgcagctgtgaaatgctttcgttggagttcatcttgaacatttcatactcatgtattaaggcatgctttcttgaccttcgaacctcttctgttccttcatgagtaatctcgagcatctcccacatttcttttgcatttttgcatctcacagtcctgaaaaactcatcagaggaaagtgcagaagtgatcatatttttagctttaaaatcatactgtgcatttctttgttcagcctcagtcatctcatcccattctttgggaaccaactcattagcaacaattttcttaggaatgaagggacctttttcaatagcattccatgctccagggtcatttgattgaataaagattttcattctatttttccaaaaactgaaatgttccccttcaaacattggaggtctgttcaaagaggcaccctctctaaaggttatttgtgaagtattcatgatgacttttgaaaagaaaaagtgatcttgagtaacttacaagaaccagctcttgatgccaattgaaaaataaatgaatacttaaaacaaccaagaggggggtgaattggttgaaaaactttgcccaattaaaatttaaatcagagtagccacagaatctttatcacttattagaaatgcttttgataccagaaatcaattttcaatcaactccccttttcaagaatgcagaaaacagagtatctcaaactgtgctttgaatatgattcacaaacaatgtaataaacatgtaaaactgagaaaattaaagaacacatagattttatactggttcacctcaaacactatgaggctacatccagttcttcactcaaaactagagagaagttccactattgcaaaatattctttacaagcaaaattacaaatctctctttgtcaaccctagacaaagttcagcaatctaaaacactattagatccttagagatacccctttcaacctgagaactctacccagttgaaaaacccagagaaacactatctctatgcttaaaagaaacccattacaatagagttacaagatttcactattacaaataaattgtaaaacccaatcactaagcaagaaaagatatcacctgataatccattaatgaatgaatatgaatgaatcacagatgagaacgcagattattacaccacagatatgcagcttttcttgactttgattgaaagtaaaaacttcaacacatgatcttcatgagtaattgattctataaagcttctacaatgtttctttctcagaattttatcactaatgaaagcactgattgtttgtgaatgatcactcaacgaaaatctcaatagcacttgttaattctcttcttcatattttctgtcgcagtgacttctatttataacagaatttttaccaaaaataatcgattaaataagctcctgtaatcgattatttcgactatgtaatcgattaatccaagatggtaatcgattaaaatgcttatagctcgttcaagattccaagaacgaatagtttaatcgattaaaccgacacgtaatcgattaaaccagtaagttatgatttttctatttagaccaattaatcgattatgatttcctgtaatcgattaaaactgaatgacagtttttaccaaaacatatgtgtaatcgattaaaatatttggtaatcgattaagacagtcagaacaacttttcaatgtttgcctttgtaatcgattaaattattgagtaatcgattataatgatcatgtctagatttcaaaaggcagttagaacaaaataatcaatgtcaccaacctggtaatcgattattcctgtgaaatattatttttccaaaaacttaaagccttttttaacttttctaaatgattttctttgattaatcccattaacctaataatcctatatgtatgaatgatgcatgttatgcaatattggattatcagatcatacattttcttttacatgatcaatttgaacttttcaacttaaagcttccttttgcatgttgaaagcacaaaactctttactttgatcttcaatgatgcttggcttcatctgaatcaacaggaggaagttgtaccaatgtttcaagcactagattactatagattcttggttttaaaaattgttcctcaccctaaaccttataagtttctatggttgagtgacaatggtgagttggttgcagataagcaagtgttacttacattatccattggaaaatatgttggtgaagtgctttgtgatatggttcccatgaagttggccatgtgttgcttggaagaccttggcaatatgataaagatgtggtccacaatgaggtcacaaatcgctattccttcttctgtaaaggtaaaatggtagttcttcaacctttgtctccaagtgaggtgtgtgaggatcaaataaaaatgagattgaaaagagaaaacgaaaagaacatcaaagaagaaaagagtcctatgagagagaaaagccgaaaagaaaaagatggcaaaaagagtgaaaaaaaaacgaacaaaagaaaagagacaaaaagagtaaaaaacaattagtaaaaagagagagtttgtttgtcaaacctaaggaggacaaaagagtgatgctagctagataacaaatgtatttacttattccaaattacatgtgtttgtcttctagtgcctgatgtgctgctaacacatcttagttttaggattaatttagttataattcaatcaataattaggaatataggctagaatagttaagattatttattttttattatctcaatttattaccattttgttaattcagagccaaaaagaggagaaaagaagaaaaaaaggaaaagactgaagctctcgaaccagccgcgcgagtagcgcctcatcccgtgctgttagcgcgagaaagtctggaaagaaccatcaaatcgaacatctcacgtgatcagcgtgagatcccatgcgatcagcgtcacagtgattctgtttctagatttaaagatatttggcacgaaaatagaagaaaaataagggttttattaccctaattaaatggagaacgttcaagtataaaaagaaggcttctgaactgataaaaacacaccttggacagagaaatacagacagaaacacagtggagagaagatcaagaccagagattgaagaggattaatgcttctgctctctttgtattctttgaggttagacatgaacatgtctggctaattttctttattgtggttagggccaagaaccaatgtgaactcctctgtaatttgattggtatcaatatgagattattatgattgctttgttttactctgttcttcattgttatattctttcttagaattggccattctatttaagttctgagagttagggttcgcaatagggatgttgggattctaatttctaacatgagtaaaataacagtttttacattgcctagggataaggatgtatgattgtagaactgtatgatatattcttttaaatgcttaacttgatagtaatcgctaaggaattaggatttttgatcaggttaaagggttaaattgctaaggaattaggatttaactaaatttggagagatatatcctctgagtaatcagaagtaattgaaattgaaaaccaataaagtgaaaaaggtaggaatcaaaggggattgtgttctaaccacaattgtttctcatcactgcgtaatcactaattcaaacttgctttctaatttttgtcatttatttaattgcttaattccacaacacgacaatactctcttttcaattttcttgtttcttccaatctctaataccttgagttacgataaaattaagaatcaatccctgtggatacgatactctacttactcactctattacttgaaatgaatggtgcacttgccgattcgcaacagtgcccttgagttgcctcaaggttttggtacactcttaaaggagtttgaggatgtctttccataagacattccccatggcttgcctcctttaagaggcatttagcatcaaatagatattgttctgggagcttcacttcctaatagagccgcctataggagtaatccagaacagacaaagaagatccaaaaacaagttgaagggttgatacaaagaggatggatgaaggaaagcttgagcccatgtgcaatgttggtcatcctagtccccaagaaagatggcacatggaggatgtgcacggattgtagacccatcaacaatatcaccatgaggtatagacatcctattccaagacttgatgatatgttggataaacttcatggttcttttgttttctccaaaatagatttgaaaagtggttaccatcaaattcgaatgagagaaggtgatgaatgaaaaaccgctttcaaaactaagtttggactttatgagtggttggtcatgccttttggcttaaccaatgcactaagcactttcatgcgactcatgaaccatgttttgagacactttattggcaaattggtggtggtttactttgatgatatcttgagtttatatggtttaacaatgattgaccacttataccatgttaggagtgtcttggatgtgcttacacttgaaaacttgtttgctaatagggataaatgcacattttgtactaatcaagtagtgtttctaggttttgttgtgagtgctaaaggagtccaagtggatgattagaaaattaaagctatcaaagcttggccatcaccaaaaatatgagtgatgtgaggagttttcatggattgtctagtttctatagatgattcgttaaagaatttagcaccatagcatctccattgaatgcaattgttaagaaaaatatggtatttaagtgggagagtgaacaagagaatgccttcaatgaattgaaggaaaagttgacaaatgcacccattcttactttaccaaaattttcaaaatcttttgaaattgaatgtgatgcatccaatctttgcataggtgcggtattattacaagaaggccacccaattgcttattttagtgagaaacttaagggtgtcatcttgaattattccacctatgaaaagaaactatatgcacttattagagctttgtaaacttggcaacactatctccttcctaaggagtttgtgattcatagtgaccatgagtcactcaaacatttaaaaacccaaggaaagcttaataagaggcatgccaaatgggtagagttcttggaacaatttccttatgtgattaaacacaaccaagacaaggctaatgttgtggccgatgcactttcaaggagatatgctttaatctccatgcttgaaaccaagatgtttggatttgatcacataaaggacttgtattctcaagaccatgacttctctaaattgtttgagttatgtgaaaaggagtctcaccaagataatctttaggcatgacaaatacttgtttaaaaataaaagattgtgtttgcctcaaagttctttgtgtgaattcatgatttatgaagctcataaaagggggggggggggggggttaataggatattttggggtagaaaagactgaacatttcttttggcctaaaatgaaacatgatttcatcaagttttgttctaattacattgtgtgtcataaggccaagtccaaagtcatgcatcatggtttatatacttcattgtcaattctacctccccttggactgatatttccatggattttgtacttggtcttccaagttccaagagagtcaacgattcaatttttgtagcgttgataggtttcccaagatggaaaatttcactccatgtcacaaagtgacgatgcttgtcatgtggtggaatttttcttcaaagaggtagtgcatcttcatggattccctaggagcattgtgttagatagggattccaagtttttgagcaacttttggaaaacgttgtggggaaaacttggaaccaagcttcttttctccaccatgtgtcatccttaagctgattggcgaaccaaattagtgaatagaacactctcacaactcctaaggtgtttcatcaaaggtaatttgaaaacttgcgaagagtggttacccatgcagaattttcttataatagggtaaccaactctaccacttctttttctccttttgaggttgtttatgtttttaaccttttatctcctcctgatctaattctcttacctaatgattcttttattttgaataaggatgggctttctagagccacttttgttagggatctccatgaaaaggtgcgaaatcaaattgagaagaagaagcaatatgcctgacacgccaacaaaaggagaacttccatggtatttggacatggagattgggtttgggtacatctaatgaaggataggtttatttcccaaagaaaatctaaactccaacctagaggtgatggtccttgagaggattaatgacaatgcctacaagattgacttgctgagtatggggtaagttctagttttgatgttgctgatctttcttcttgtgatataggtgtctcggatgaaaattcgaggacagattcttttcaagaaggaggggatgatagagggctatcaaaaagcataagacctagaaccacttgatcagttgaagggtcaaacgacaaggtccaaaaccaagcttctacaagaagagatgaccaatagaatcaaggatggactactcatcaaaggaaaagagggaggaagccacaaaaagttgaattggagcacattgaagattttttaacaactcgcttagcgcaattcctttcgcattttttgtaatttcataatttttcgtaatttttcatttacttgtgtaatgagcctcaatgttgatgtaaataggcctaaactgtgcattttagtatgttaatagaggtttagctctataagtactcataaactcttcattttttttgtaactaattttgaatgaaattgagcttttgcttgaattgagagtttaatctcttctttggttcttgactaaacccaaattgattcctatcaaggaagctttcctttgtgacgaatccttctctgacttatcgttcctccacggatcgtggcatcattctttatcaccttcttcatcttctccattttctattttgaagttctatgcaatcatcaatggagtcttgaaaattacatttggaacggtccaatccaagtgttcatgacttggatatcatcactttaggaccttaaaagtaaagtcgttcagatactggagttaagcaataacttctagacctttatagttagggttaacctagaggactattggagttgcaatcattagagaataaaattttaagttgaagtgtcaccttagatgtcctaatggagtagtgacaaccatgagtaggaaacaactgtatgtgctttgaatggtatgaggattagaatcagtagagatgttgtgagatattggactaggtactagtgtgaagtaagggtagccaagtactagaatgaactatagagatgaagcctaggtaagttttaggaaaagaagctcggattagatcaagaaatgagtcaagtgtagccctagctaccttttgataggtgacaatagtgttagatcaaagcttgaagtccttagttttagttttgatttgataattttgcaatgccaaacatgcttaatagatgtgccatttgtattgaatgtttttagactaaccatgtgtgtgatataatctaagtcttttacatgcttagtgttgatcaaatatgaagtgaataaagtcttctagttctctaagtttactaagaacttacttctacttgaaattaggctagaagcatcgaattaatcaattgcctaacctagtactcgagtgcccaagccagtttcagaagaaagaagaatttgtagcttaggataatggattgtctcatttggtaatcaattacccacctcctggaaacaaagataagctctttgtgtggctctataatcgattaccatatgtgacaatcaattacctaaaaagcatagtagaaacaaagatactcaaactaaaatgaattaattgattaccccatttcataatcaattatctagtttctgaaaaatgcagaacaaaggagtcgtaacaaattaattgattggctaattttataatcaattatattatttttaactgtcaaaatttataaatacctatgtgttgttttctctattagagactcttgatacgttaagtcttggagaaaaatatttcaagagaatcttttaaaaggattgcactacttttagtttgaagattgaagttgatcaaagaatcattcattctaccatcatgaattgatcatcttatgaagagaacttgaagatattgaaaatcaacacattcaggtgtattcaatcctttatcttacattctttttaagttgtgattcttggttagggttaccaagaggtttaaagaattgatagagtttcaattttgggtctctctaatgtaggtttcaagggaaagattagagttcttttagggaatttatgtgtgcatagtatttattattgattctctaaatagtgaaagctctaagaggtcttagaataactgtatgtagtcatgtttggactaaaaccaatataaactcttgtacgattctctttttctcttaacttttagtcataaactcatcttggtattagaattgatctcaaaaggccataaaaactctatttctacatttgctataatcattgaaagttttattgattatgttgatcttttgatgaaaattttattaattaaaataagccgttttaatctaaccaaagaactaattggttaagattttgaaaaaatctattcaacaacccccgttctagattcccagctgatccaacacgtagtggagaaaatcgttatagtctagagcacatgtctagattgactagcataggtaagaaggagttatatagatgtctaatgggtaggagaccttgtcttaatatttgtcagcctactcttgacatggaatttgggggactagtttgacataaggtattgtacaaccagcttttgataagatcattccttaaaaaatgaggaaggtagacatgcatagttcggtatttaatttttaggacaaaaatatttgaaggaggatagagttgtaatgccccaaattttgaattatataaatgagccatgatgagacccttattagaaccttactattatataatttgatttcgctattataattactatattatcttatattaccttattttatctaagaattattttatgttcaaattataaatatattttctaatcttatcttatctcatgatttgttgtgtcaaactaatatgaataagatattaagataataacagagcaactaaagtccaactggggactaagcccaatacaccacaaacccatccaaactatttttctaccgaagtcttaagaaaaagaaagggaaagagaagatttaagtttagtctccatatgatagagaaagaagaaaataaaagaagaggagaggaacaaatgaaaaaagaagagagacaaaagtgtaggtttgttgttgctacaacgcttcacttagagtaatgcctctttcgaggtaaggaggaatgagttttctcttactttctatggtttcttgtgatggtcagtgggtttgttcctaaacacttagagtaatgcctctatggtttcttggacaattatgaatacatcaaagctttgtatatgttttgtaattgagcaaattggtgtttgattgattttaagtttgttatatgtttcttgaaatccccccccccctttagtgttcttaagtaaaatttggtcttttaataatttggacaacataattggtaatcaattcataagttcaagtaattaagtttttgaaatcaattaggaaccacatatagggatgaaaattaaactcctaaggactcattgtgaaggttgggggatgtttgggggctattggagacctcaaactcgcaaacttatgcaacaaattttgttttgttttgttagatgcaagttgaatgagtgtgtagtttaaacaagatcattggcctttaaagaataaaaaaaattggatctggaaaaaaacatgaactcatactactatactaaaattaaaatttgaaaccctaaaatctatcatctttttgtgaaatgactttctatgtgtggcacaacacaaccccattgttgtctctttctcatcctatgtcccttgtttgtcactacctcttatttctaactttctatacacgtaggtaatctcttaacttttacttacacctctccctctcaatctctttgatacatttctttatttatttttttaaaaagttttatactttgacattggcgagagctggatgggccatttcttaagcggtacttaactttcttttctccttctcttatgctcaaattttaactgactttttatccgtaggaattaaacacaatattaggggtatacaaccctcacacaccttacttaaccaaccaagttaggcctcattggtctaatatttgatgaggaggactttgtttggggattgaggcatctgttaaggaaactctatgtacatgtaattgggtgtcaagtgaattgttgtcacatagtaatagagattttgaagtagttggggtctcactcatttttatggtgttttacacttttttatggctacgagaatcttgttgtggtcccattattcttttaacacctaaatgcatgcttttttagtcacaaggcccacaactctcactttggtaacgacttttgacaagttcagtaaacttgaattttctagcaaaattcaaatttggctttggtattgttttgttctatcgaaactactgtataattagtattgctattaacaatagctttaaatctagctgcatgattgacttttatctatcataagtttgattagctattttctttggagcacacattttgaactctgaaactacatatttattgcaatgtatgtgcactatagttggtttttctcattcttttttggtgtatgttaacaatatatttcttcaacctaccaaattgcaagttggctttcttattaacttgtataattaagtggtctacaattgaaaccagaatgcatgagtaactaagaaaccattttatggatttgaaaaggggtaaaggtgtaaattaattcactaccacaagtcaaaaccattcaacattcacctacaatatttattctaacattatatttggtaactgttacttaacaatttatacatttatattcctttttttcttctcagtacatatgctaagaatttaaaaaggttgctctctgttgtggtagttttgttcctctagaaggttttattttttatgtttcttagcctttgtcataataccaatttagattcatgaacataatcatctcatgttagaatatatggtcaatgataattacaatttcttattttacctagtaactaggctttattagattcatttattgacttcctagtttgattattatattatgaataagatataactgagcaacctagagactcctaattactttgttttagtgtgataaagtagtggttttattccttttgatcatattttgtcactgttgccattgatgagttctaaaagtttagaactccaattgttttattctccaatggtctctgcttgtgaatttgtccttgtttgcttgtagtagagcactgatgtgttgcaaacacatcttagttttaggctagttttaggttacaatttaattagatagtcaggaaaatagaatagaataggttagtttgttatttatattccatttgatctcattttattaccaatttgtgatttcagggcaaaaagaggagattcaagccaaaagatgagaaaaacaaagttgaaggactcgctcggatagcgccagatcccgcgcgagtcgtgccataggcgaaaatacaagccccagtctcgaacaagccacgcggatcgcgccaagtctcgtgcgattagcaccatacaccttaaagcaggcagtcaactcgaagactccacgcgatcagcgtggaagcttgcaaggaccagccaaatcagctcgaagacttcacgctgttagcgccatagagccgcaagtcccgcgcgatcagcgcggagtcccgcgcgagtcacgccacgaagatactgttgccttatttaaaaatatctggttcgaaaattggcacaaaaagaggctttgttacccaaattaaaccattctataaaagaaaggcctctgggactgaagaagacacactgggcatcagattttatcattctaaacctctggaattcattcctacatagaatcaaggctagggttttactgcaaaatcatgttttctatgacagcttttgtgttcttgatgcctatgtcaagctaaactctgtattgtggttaggccaagaaccgatgtgaactcctctgtaacttgactggtattgaatgagattgtcatgattgttttattttactctgttcttaactgttttattcttatttagaactggccattccatttaagcactgagggttaggattcgcaatagggatgttgggattctaatttctgacttgagtaaggtaacaattgttcattgcctagggatagggatgcgtgactgcataaccttataatatattcttttaaatgcttaacttgatagaattcactaagggattaggtttttgattcaggttaaagggttaattcactaagggattagggattagctaaattagaaaagatttattctctgagcaatcagaaacaatcgaacttgataactagttaagagaaagaggtaggaatcaaaggggattgcgtcttgaccataattatttcgtccattggttacaactctctctttatttgcaatttacttcttttaatttctgctcttattcaaacattcaaccactcaacaacaattctttaaaacatgttctttttcttttccaatttcttagactgctacatactgtgatttcacaccaatccctgtggagacgatacttacttacccactttattacttgaaacgagcggtgcacttgctgtgttcgcaacaagtttttggcaccgttgccagggattggtaaactgattttacagtaattttaatctttgaaattggaatttttgttactaatcgcttctccgagttttatgtgaggttcggtcaattctgaggagttacagtttgatcctgaaatagagagaaccatcagaaggaggctagctagacaaagaagtagagaagctgaaaattttgactttgattcaatccctgaattagagtctgaagcagagatggttgaagaacaacataatcaaccaagaccaagaccagaggatgaactaatggaggatattctgtgtaatgcctctctttactctctcgtgcttgattgattttaggtgaaatctcgtgtccactttgtattagaatcatgttatttataaattttacagaaatttttttttcgctttgcttgcaagtttcatggttcgttcgtaacgtaaacgcttctcctccactacggttcaattatgataaatagatacagtccataatacaacccatatacacgtccaaaaatatacagactgtctagttttaatacaagttacacagaaacaaaatgcacaccaaacacaaaattacaattcatcaatcttcctcatcacatcttcttcaatatcatccatagcttatgcttcactgtttccctgctcgcccaaatgaattggggtcatcacaggtgtcaaccacagacacaaataggggtaagtatatgataaacatagtttgaataaaacatatataaacacagatgaataaagccttatttataacaagaccacacaacagatccaaatatacagaatatcatgcatacccatcatgtgacgcatgagatgcatgcttatctttttatatgatgcatgactgagatcccagcttatcataaaatggtaccatgatcaacatagtttcacccactctagtgaaacctccctccattctgaggggtcatagtcaaaaatagtttcacccactctagtgaaacctccctccactctgaggggttaaagggtaccatagtttcacccactctagtgaaacctccctccactctgaggggtcaaatgcagatgaactatgccataacttgtttttatttcttatttacttttcaccatttattttatttctcaaaatctcatatcagatagttccacccactctagtggaacacatcacaaagctcaacatctttgaccattcaaagcatatacttttaaacaacaaatcaaacttcctttaaatcatcatatcaagctttacataacagccatatttcaccttcataaattcctcacagataaatcatagtttacatggaaaattccatagaaacactcaacaacacatgggaaacactcagcaacacatgaaataatacataacttttattaaagcaaccagccacacaaatataattcaactcaacaacaaggattcaacccaacattattaaacatattttgttcattgtgacatattatcaaacatatagtgtgcaagctttaaatcataaaattttgtaaagaaaactacttaaatcttaaatttcctaaaattcaatataattctagaataaataaacatggttccaacataattcctagcataaactagacatatttcaagaatttccaaaatacttttaatggaacttataaattttagtagaacacaactactttaattttagtaaaatatttgtttttcttctaaaatacctataattgattcattcattaagttaagctctaattatttatacatcaatcattctttaacctaaaaccaagtcatttatccaagtaatcatgttcctagcaatctttatttctttgagacatttcatcaaacacttagaatacaagacttaatcaaatgaagcaaggaataatattcaaactaagctatcataaactcccccataccttacttccttctccaattcttggacaacccctagctcctaatgctttgtgggcaggttgtttcctttgtagttgcatgattctttctcctaaggtttctaatgttttacgtgggaatttaaggtttaagcttttgtttggtgttctatgtaaaaggtagaattacaagaaataaaagggaaaggcttttgaacaagtttttggcacggctgaactccttttaggacagcccaaattttggttcccttttgccttttttataggataattaagcttgaaaatatctaaggctagctttattcctattggctatttgatttgtaccttccaactggcttatgtatagacttttcttccacctcctttcttattttcacgtgggatattagcttggagagcaatccatagttgtttccttccgttggaatgctagctttcaatgtaaaaatctattccaaagtcatgatagctttctttccatgtgttttcttctaattggctaacctttcctaagcttccaagtggctaggcttcttgatttttctacacttcccttggctcaagcttgttgtgcacgttcacttctcagatggtgtagcattccatttgctctttttatacgtatggtatttgccttttgtgatatgtgttggctttattcttgaaaaaacccatttctgtaaaataataatgctgggtttgttaaccgttggatcttcttaaaattttaagggtatattcctatcttacatatctaagttttgaccgttgggatttttgaaataaggcctagaaatgtccacgtattctaccaaagggaacaaaataaaatttgcttcaattatctcttaagcatttatgactagctttccacttggaccaataggaattttcaagcttcttaaccctccatgtggccaatcttgaagcttcttaaagtttttcgccattgatcttgcatcatatggtcaagacttaatttagaaatccaaataaatccaattttcctttattacttataatagctaaattctaatttcttattggtccattttgccttgaattattaaaattactaaactaactcatttaggaaacctattcctcccataattaagagaaaactccatagattacatctattatttttctgagattttctgatacctaaagtagtctagattaagctttttttcaatctattttccaaaattcgtagaaattctattttagggttctctgccctcaaccttagtgataagttgttatctaaaagtattttatcctatacttaggttcccaccaatttctaaagtcatctcggtcaattttgacctagggacattttggtaattttactcctcaccttaggggtatatttgtcatttccaaaaaatgttcaggatatctctgtaagtattaccctaagggtgttctgatcatttttcaagtatcccaaagtgtttatagaatttcctccttaaagcatcttgttaaaatgcccaggggcaatttggtcatttctaagatgcgcaggggtattttcgtcattttcccccaatctttctgtactgccttgaatcaacatttaaccctagtaattgactgtaatttccaaaattttggggtgttacattctggctcctatgttcacaagaccaaactccagtattgtgagaccatcaatccaagcaaaccactttgacattaatccttcattgattgctttggtggaacgcagtcagtttcgtggggaagactttgaagaccctcatgatttcattgacagatttctgagaatctgtgacactatcagacaccaaggggtctcagatgatgctgtaagactcagcctattcccttttgctgttaagggacatgcactgagatggttgaacagacaatcatcaaatagcatcactacttgggacgacttagtctcaagatttttcgctcaatacttttccatggacaaacacaacaggttggtaaatgagattaccaacttcactcaaaatggaagagagtccatgtgtgctgcttggaacagattccaagaattgatcaggagatgtccacaatatgacatgcctgtgggtaagcaggtacgtattttttttattggtatgactcctgaatcacgcatgattgttaatgttgcagaagggggtactataaggtccaaaactgcagctcagacatatgagcttattaattctctggcccggaatgaaaatgagagtataaccattcagccaaagagagaaccaatccaactgtccagcaatgatgcaatgcttgcaaagcagaagattttggcccaacagttggccaagttgactgagaaaattgatagattacaagtctctgcagcccaagttgcagccagtaaaccacatatcatctgtgagtattgccaaggtgagcacgaatctaatgaatgccctattcttgttggagctgaccctgtgcaggctaatggcatttggaatgatcagcgacagcagcagccataccagagaaaccataattttgcttcgggaaacagctatcagagaaaattccaaggaggcagtttagactacaagtctaacaattacctccaacctccagctattcccaacaaggagatttctgaacttgaaaaggtagtaatgcagttgtccaaaacaacaactgaacacatccaggccaccaatgcctttataaatgagaccagagctcatagaacaaaccaggatgcttccatcagaaacctggaaaacaagattggtcagcttgcaaaatagttggctgagagaccaccaggccagtttccaagtgacacagttataaacccaagggaacacgccaaggctattactaccagaagtggtaaggtacttactccaccagaaaagcctcaagtgagtagaaaggaagctgagaagaaaaatgcagcagctaatgtagatgaagaaaaagctgcagaaaattctaaagaccaagattctgcacctccaaagaagaaatgagatttctctcgctttgagaaacccccatatccagtgcaaaccaagcaacaacttaagaaacagcagtttgccaggtttttagacatgttaaaaaagttacacattaatataccatttgctgaggcattagctaatatgcctaactatgcaaaattcatgaaagagcttttgtctaagaaacacaaactgcaggattgtgagaccatagcagtcactgaggagtgcaatgccattattcaaagaaagcttcctcctaaattgaaagacccaggaagctttaacatccccattggcataggaaatatcaatgtagggagggcactctgtgatttaggggctagtataaatttaatgacattgtagatgtgtaagtccctaggtatctctgaattaaaacccactagagtttccttgcaattagcagaccgttcattaaagaaaccatcaggggtgattgaggatgttctagtgaaggtagataaattcattttccctgcagactttattgtcttagatatggagggtgaaagtgaaatccctctgctgttaggaaggtcatttttagcaactgctagggccttaattgatgttgagcagggaaagttagaattaagaatggataatgaatctgttgtctttaatgtatttgatgctatgaaacatccagccgatgaacatgattgttttaggctagatgtgttggataatgtgatttgtgcaggtatgacaacagaaataacagcaacagcagatgcagagaatactgcagcaggaaatactgcagaagaaaatgcagcagcagcagaaaacattgcagaaacaaaatttgctgcagaattgcaatctgcagaaaccagtgaacctgtgctggaagagctggagaaaaaggaagatgatattccagcgggagcacctaaggtagagctgaaggaattgcctgaacacttgaaatatgtattcttaggtgagcaagaaacatatctagtcataatcaacagagggctggaatggcatgaggaagaaaaattgctgaaagtactcaaggatcacaagacagccattggctggtctatttccgatcttaaaggtataaacccctccttctgtactcacaaaattctcatggaaagtgatgtgaaacctgtaaggtagccacaaaggagactcaatcccataatgaaggaagtggtaagaaaagaggttgtcaagctgttagatgcaggtatgatatatccaatttcagacacagcttgggtaagtccagtccaaaccgttccaaagaaagggggcatgacagtcattcaaaatgacaacaatgacttgattccctcaagaaccatcacaggctagagaatgtgtgtcgattacaggaggcttaacgatgcaaccagaaaagaccacttcccactccctttcatggaccaaatgcttgaaaggctggctggtcatgattactactgcttccttgatggatactctgggtataatcaaatcccagtggcaccagaagaccaagagaagacagcctttacatgtccatttggggtgtttgcttacagaagaatgccatttggactttgtaatgcacctgcaactttccagagatgcatgctttccattttctttgacatggtagagaaaggccttgaggtacttatggatgacttttctgtttttggctcttgctttacttcatgcttaaataacttagctaaagttttaaaaagatgtcaagagacaaacttagttttaaactgggaaaaatgtcacttcatggtcagagaagtattgtattaggccataaaatttctgaaatgggaatagaggtagatagagctaaattgttactaattgagaaattacctccccctattaatgtgaatggtgtttgtagttttttaggccatgcaggtttttacaggaggttcatcaaggacttctccaagatttcaaagccacttagtcaattgctggagaaagacactgaattttgcttcaccgatgcttgtcttgaagcattcaacactttgaagcacaaactcaccactacacctgttttaatagctccggattggagtttgccttttgaactcatgtgtgatgctagtgcttatgcagtaggtgcagttttaggacagagaaaagagaagtgcttacatgtcatatattatgctagtaaaatcttaaatgaggcacaagtcaattatgccaccatagaaaaatagatgctagctgtagtgtatgctttagataagttcaagtcatatttagtaggttctaaagtgattgtgtatactgaccatgcagctctaaaatttctgctaaacaagcaagatgcaaagccacgcttgctgcgttggatgcttttattgaaggaatttgatttggagatcagagataaagctggagtagagaacaaggtggctgaccacttgtctaggattcaggagaaagacttgcaagatggaccagagattgaaatcaatgagtctttccctgatgagcaagtgcttgctgtgcaattcaatccatggtttgctaacatggccaattttaaagctgctggaatcatgcctgaagaattaaattggcagcagaggaagaaattcttacatgatgcgagaaggtacttctgggatagccctttcttgtattttcaatgcactgacaatgttatccgcagatctgtagctgaaactgacatgccaaatattctgtggcactgtcattcctctaactatggaggccattttggtgcaaacaaaactgcacacaaagtcctacaatgtggctattattggccaacactcttcaaggattccaaaaactttgtgatggagtgtgatagctgtcagagaacaggtaacatttctcgcagagatgagatgccattgaaaaacatccaagaggttgagctgtttgatgtatgggggattgatttcatggggccttttcctaaatcattctccaaccaatacatcttggttgctgtggattatgtttccaagtgggttgaagcagcagctttacccaccaatgatgccaaggtggtggtctcattcttgaggaagaacattttcacccgatttggggtgccaagagcgataataagtgatggaggtactcacttttgtaacaagcagtttgatagcttgttggcaaagtatggagtcaaacacaaagtgcctaccccttatcaccctcaaaccctgttaagggtgcggcgctgatcgcgccagacccactgggatgtggcgctgggagtgccaggatggcgccaagagtgccaagttctctggaaactggcgctagtggcgccagatccacgctggtggcgctaagggccttagggcggcgctggtcgcgccaggttctctggagttccacgctaggagcgccagagttggcgccaggggcgccagatttcccagcccgcgcggatcgcgccataggttctggaaaccggggccggtcgcgtgggagtggcgctaagagcgccaagctaaccgacatactggcgcggatggcgccagagctggcgctgatggcgccggagctggcgctgatggcgccggaggttgggcaagccgagtataaagggcgaaaatgcgaaaagctgagagagaaaatagttttcttcctccctcagccataaacctccattgttggagtgcccaagcttcctaggaccctgtttcttggcctaaacaccttccgtagacctttaatcttgtgagatcacttggaaagccataatccttcattctttgctcttgaaaacccctagtgagtgagaattgatttctcaagagagaaacttcagagaacttgagagtggacgagactcaaggcttggaaaggacaatagagcttggggaagctgtcctgagatcttctgagtcgccactaaggtaagagactcaagtttctccgtttaattttggattctgggggttcctgtgaatagtgacccatatgagctggggctagaattagcccagggtcctgtagaggaatttgttcagagcttagaatagatgaaggattagctttcagtttttgattctgatgactttgagttctggctctgttgttacctatgtggcctgtgtatggtcacttgtattggtcattggctatgtcagagccttgtatatgttgcagtgagcctgtgtggctaatggaatggcaccttgagtgaggctgaaccattccagtgagattctatatctgaggctgatgaaaggttatgtcatgtttgtggggcattgaatctacattgattcctatgttggtactcagcccagatggaccttgtgtggtctgagagaagcctaatgataggctagacttgttttgaaccctaggataggggaattatgatatgtttagtttgtgattgatgcctgtggtcttgacattgatatgtaactgtatatgccttgtataggcgttgattctgaggtcattggtggcaggagccacagagcagggaccagaccacagagtgatattgctccaggtaagttcagtgtccctggggatgattcccatcttgtgtaccacaccacactccgggggagtggtggtcatttcataatgcatgcatggttatctacattcttgtgatgatatatgtatgcctctgtgcttgaattgtgttgtgattgtgattgagatatatctattggccaatagatagatatggacctccctaggagatggtttcctcatagtatggttggctcatgggtgatgatgatcccggggtgatgatgatcccctagaccaagggaatagttcagatggattcctgctattctcggaggtaccatatatgtgcatccatgataagggtagcacccaatgggatgacacaggtgtgagttccggcctcacactgggagatggcttcctcccattctaggagatggtttcctcctattctgtgactttattacaggagatggcttcctcctgctctgaaatgtgtagtcaccctgtatgatatgttgtgttgttgagaaagccagagggctaggccagtgggccatttgattgtgatctttgtgtatgtataatatgatagtgggccagggtggaggagattcctccatggatcctgagcttactgagatatgttatctcaccccgtgtggggtttatgtggtttcaggtgaaccctctagaagagaagagcagtcttagggcaagaggcccatcagagactagactgcttggctgaggagcagcataaagagcatgaaggctccatattttattttgtgtttgatgtatatttctgtacacctctgctgagggttgatattattttttagcaccatggtgtggtgtgaaactgagatgtatatatattgtacaaaccatggatgatatgtatatgatactttcccctgagtatatgtgttgtatatttattactctgcctaagaaccttgttatctgtctctattatgattgttttgtgaacactggatcagcaggggcgtgtattatggttttgtgtatatgtgacttgagatattggttattccatatataatgtatcaagaaatacgattctgagcttccgctgaaagtttattttatatttatacgataatctgatattattaatgataacacgtcggaggcctacggggtgttacaaacaccgtttctgtcccactaaattccactaatgattaacaagaaggaaatgtctagctcaagacgttaaatgagcgattctcggaatccttttcgagaaatcggtaactaatgtaaatacataagtgtttaagttcttttgatagcagtagatttactatgatccatatttcactttagtcattattcatgctctattagttaggtatttcaagtctttataattttttgatagttttagatttatgattaggcatactcatttagagtcaatttaggtagtatttaatctacctagattaataaaataaaaagaaaaaataaaagaagaagaaaatgtggaaaataaggaacactcacacttaaccaagaggggggtgaattggttaaccttggtaaattaaaattttctttcaacaatatcagagtttaaaatcagagtttaattccctttggatctttatcacaaaatacaattgaaaaactttatccaaaaaacaatccaagatttgtaatacctcaagaataaacttcacaaagaagaaaacacaacactcaaatataattcataaaagaaattatctaaactgcaaaatataaatcaagagacaagatttatactggttcacctcaaaacctatgaggctacatccagtttcttccactcaacactagagtagagttccactattgcaattatgtttcttacaagcaattacaagcttctcttcctcaaccctagaggaagttcagagatctaaaaccctattagatccttagaagctaaacccacactgagaaacctactcagttgtctttggagaaaacctatctcccttggagaaacactatcccctattgcaagaaagcccaaatacaatagaatcaacaaaattcaaaattattgcagaaaacttaatacccacaaagaaccaggaaagaattcacctgatgatccaagattgaaatgcaaatgaatgacaaaactcaggttgaatgcaagtcaaatatgcagaacagctttcctagacctttgtgaaaaaatagtttgcttcactaacaaaactagtaacccatggatggcttaatagaagcaaagctcaaataacccagaagaatgccttattgatttcttagaaagctcagaacatcgaaaagttttaatatcaatctcaatctctgttgtgttgaatcacaaaaggcaagggttatatatatagttattttcgtaacgaaaataattgattaagaacgctctagatgctcgtgtaatcgattaaaccgtcctttggttttctcaggatttctttaaacgggttaaataatcgattaacccgtggtgtaatcgattaaagcagactaagctaaaatcctgataatgaagtgtaatcgattacatctttgtgtaatcgattaaagccgtcctatgctgaaatcatgtttgtgaaggataatcgatttcatccattggtaatcgattaatgcagcgtgatgcaaaaacatgaatgtactaaaacaatcgattacaatacgtggtaatcgattaagccagagtgacagtatttttcaactaagtgagtaatcgattccaatatcatggtaatcgattaaagcagtcacaaggccaatttctatgtatgcaatatttcatgtaatcgattaagttgatgcaataatcgattaaagtgtttatgtctgattttctagaaaactgatgaacaaaataatcgattatgataagcacgtaatcgattaaaacgactatatactatgttttagaaaacatctagctttttcctaagtttcaaaccaattacttagtttctatatgattcaatgctatatgaatgatatgtaactaaaacttggatcatcacaatgcttttagaccttttacatttaaatcaaaaacatcacttcttcaaatcttgatccatgttgaaagccaaaacctccaagtcttgaaccttgcttgaatcttcacttgatcttcattcagctccccctcaaatcaacaatctccccctttttggctttaaacatgccaaatctcacattgaaaagcaatgggtctttgtgatttaatggaaaagctttgaatatttctgcatgttgcttatcacctgaaaattcaaaatatctttccaagaacaagtgttaaacgtaactgaactttattcattattcattcctatcatataagcatcaatagcaagtagtttcagtccttaactccccctaaatttaccagtatatgcaactaaaatttttggtcaaaaatggtacaaaaaacagaggtgaacagagtatgatgcagagcactcttgtttccttttgattttcaattattctccccctatttggctttttaaagacaaaaattgaatgcacaacggataaatgataaccaaaaagcataagtttcattaatataggctaaggagtacattgaaggacctaaaatggaaactaaaaaacagagtacataaaaagttaaaataagcataacagactaagactgaaaacataaacactactaaggtttagagttcctcatattcctcatccattttaagagtggcctcgatatcatctagtctctcattaatctctctaaatgagccttgaacttcagccttgaagtcatgctgcatctgtaggagaccatccatctttgcaagcatcagggcttcaaattgtgtgaagaggctgctcagattggtcactagagcttgcataccctcccacattttcactatcagccacaaattgttcctcctgttgctgaggcccttgctgtggtggttgtcctcccattacccagccatctggggtcttacatagaccaagcttagagagatgtttctcttgaattaggctgtttgaagaattggtattgtctactacctcattggatacatctatgccaaagtgatcaataaaccttgacacaagaacaggataaggaaatggatagttaaccagtctcttagatttcatcataatctcttggaatatgagaacccagttcattgggacaaaattgatgagaccatatatgagttgtagatcctcatcagtagcttgagcatggtttgttgctcggggagtaagaatgtaggtgattaagtagtgaagaagcttattttcaggggacataggaccagtgctcaacctatttccaattggttgattaggattactcaaggattctctataagtccccattttggtatagccaccaggggtttcgttaaacttcctctcaccttcattaaccactccagccactgtctcccaaatttcaggagtgatcagcatttcaactccctttactgtggttctatagtagccttgcatagaagccttgccacatgtgtaaaagaccttaacaagatcagggtaataggtacccttcatttccatgaaccgtctaaggccttgtgtaacaccccaaaatttaataaattacagacaaatattaagagtaaaatgttaaggaaaggcaatagaaaatttagggcaaaatgacataaatacccctgaacatttgtaaaaatgacgtttatgcccctagggtgaaaatgacaattttgccctaaaacaattctggaaatgaccaacatacccctagatattttagtaagatatttactaggagaaattaccaaaatatccttggacaatttcaaaaatgactattatgtcctaggatggaaaatgacaattatacccctagacattttgaaaaagaccaatatatcctagatattttgataaagatattttgggagaaaattacaaaaaggtccttgaacaaattgggtaattaccattataccctaaggtgataaatgaccaaaatgcccttgaagtcaaaactgaccagatgaccttagaaattggtaggaacctcactattgaataaaatacttttcgataatcatgaatcagtcaggttggaggcaaaaaaccccaagatagaatttctacaaaattttggaagttagattaaaaagagcctagttcagactaccttaggtatcaaaaaattatgagaagggtatgagtataatttatggaattttctcttaattgtgggaggaaaaggattcttaactaagttagtttagtaattttaataattaagaacaaaatggaccaataagaagtcaaataaagctattacatggaatgaaaggaaaatttgtggaataagttatctgagatcaagccttggctgtataatacaatatcaagggagaaaagccttaggaacattcaagaattgacacatggagaattaagaagcctagctatttccattggttcaagtagaaagttaagttataaatacttaagagatatttaaagcaaattttatattgtctcctttggcagaacacgtggacatttctagacattatttcaaagatcccaacggtccaaaattagatatgtgagttaggagtacccctttaaaattttaagaagatccaacggttaacaaatccagaatcattattttacaaaaacggatttttcaagaacaaaggaaaacacaaaaacgtaaaagaaaaggaaattggtaaaactttccctagaagctttggcattccacgtgagaatgaagaggaatggagaagtcttgagaactttcaagacttggacacttggatgatgcaaattgactagccaataaggtggaaccacaaggaaagctagtcattatgaccttggatgatatttgtagaaaaatcaagctaaagcaccctataaaagggagtaggactgaaattgggacagctctaagagagctcaaccgtgcaagaatccctctcaaaagcctttccattttatcctttcaattcaccctttcacctagaacaaaaatcaaagactaaaagcttgagagttcacgtgaaggccaaccactttaggagcaagaagtcttcaaattcaaaggaaataagctgtcattaggagtaaggggctgtccaaaagcttaggaaaccaaggtatggggagtttatgttgaacctagtttgaataataacccttgtttgattttattttgttttgtagacaaagtgttcggtaaaatgtctcaaaaagcttaaataactattttcttagctacttgattctaaattaattaactaatggttagatgagtaacttgagctaaattcaataaagaagagaaagaagtaattgaaaaatagtggtagtataattattttgaataaacttgtggtttagacttatggttaattaatggaataattttactataaatttaaggttggctgaaattttcctataattgttttaatggtgtgtagtttactactagaactagaatgagagtgagcttatgttagcatgatataaagattcatgtttataggtttatatagctttcttttaaatggtctataatgcacaccatgtgtttgatatattgccatagtgaatggaagatgttaagtgttgattggaagctgttgtacctttaaattagttgctggaattaattaagttgtatgttgttgtttctgtatttaataaagtagtatgttgctgtatttatgttgctgttgctgtatgtaaattaaatcgtttgttgatgcaagctgtatgacatatgctgttgtatatgttgctgtatttttatattgctgtatgttattcatgtaagttgctgtatgttaatgttgctgtaagttatttagtatgttgctgtatgttattttattatgttgatatggctgtataatatttgattattcacttgatattgggaaataaatcaagagttgtattatagtgatgaaagattggaatccttgtgttattaaagaggttgtggttatttatggattccaaatgttgtggtgaatcatgattgaatactaagactttggtgtaaaagttttatgtgaaagccttatgggttgaaaagatgtttaagactttataaaataaatcattcatgcatttcatacgcatatgccttgcgggggttaatccgtggagatgatgccttgcgggggttaatccgtggagttgttgtcagatagtagtaccgagtccatgcgttcagagtggaactggggggtagtgtgtattcagggaggaccacaccaccatgatgatcacataggtggaggtgacattcctacgcgcccctgccctaccccgactgattggataggtatgatccactggagtgggtggagctatctgactgtggccactgttgatgattttatgagaagccgagatcgcagtcatgcatcatgtaaaaaaaagacgagcatgcatcttatgtatcacgcatttgggtatctgtatgaaactctatatactgtataggttgtgtggctttttatgattaggattttatctgtccgtacttatatatatatatatatatgtgtgtgtgtgtgtgtgtgggtgtattatttgaactatgtttgtcataaacttacccgagttgtgtctgtggttgacacctgtgatgaccccaattcatttgggcgagcagagaaacaggaagcgtgactgtagatgaaggatattgaagaaattgtgatgaactgttactaatttgtgatagacaatctgtatattattttgaaaaactgactatggactgtatcatggactgtactcttattatttggatttttgttatttgaaccgtggtgaggaaaatcgtgtacgctatttacgaattataaaattagcaagcaaagcgaaataaattttcgtgaaaatattatactaatcaaattttaatacaaagtggacacgagattttaaaatcaatcaagcacgagagagtaaagagaggcgttataccttgagtctctaataggacaggaaacacaaaaccttcattaataaaccaatctaagctaatgtatttaggagagcagatgggtttggttgcattaaactgaagataattcattttgtttgactctttggtaaaccaattgctaagtctatctggtggggtttgaggttgaggatttgaagatgactctcctacttttctcttacccgttctaactctctttggtgcagacattttgagataaacaccgaaaagaatagtatcagcgaaaagaggatgataacgtgatttttggtgcaagaagcaatagagtcactagtctgttatttataggcacaaattaagcacaaaacggttataagtttgaaaaatagagctgttgggatcagttaatgcaagttaatggagatgtaatgtaacgccccaatttattaatcagggtcattactaaccacacatcacaaatcaagcaattaatcaatcagagtttaagcagtttggaagcatacactagaagtgacagcatcacagtcactatcataacactgtacatcataatatggtgaatatacatcaaagtttcactgtacaatacaaaactgtacaactaacccatcagggtacatcaaggtacataaccaaaacaaaatcagagcataggagcaacatgctcaagtcctctatcctagtgtgtccttcagcagctaatcctgcacaggcttcttgccttgggacctctctgctgctctggaagaatcacctgcaaaacatagccccacacatggggtgagatataaaatctcagtaaactcagggccctggaaggtatttccttcccctggttcactgacaacagatacacagacagaatcaccatcaacacataaacaatcaatgtaccgccatctgtcaatatccacatgattccgatggtaagcaccatctatcacctatcaatatcctgcggaggctatcacctagacatatatgccgatccaactcacagaggatccaatatgctaggccatctcatggcaggacgtcactatccatcatcaccatcctgcggaggctatcatctagtatgtatactagaccatctcatggcaggacgtattagaggcacctccgaaaatatatataggtacaaccacgtctggaggactcctatataccgggtcaacctctatcatgagctacaactcatatctcaatacaattcgcctgaggaggcttcttccgtgaatataggaccatctcactaaggaggctatctctatatcacagaaaacatctcatgtcaggcctgtctcaatcacatttcatctatcctatcaccataggatttcacaatcaattgtgcatatatttagctaaacaatcatagctatgcaccacaattgcccatcactgggtccagatcagatcacaacatcacagatcaaatcacaaccattacccttctcatagggcacaattatcactcatcagcaaatcagaccacataggaatgaaagcacaacagaaccatcacccccttaggagtgtggtggaacacagtaaaggaatcacaaacaagaaccaagagcttacctgctctggagcagtcaccggctctcccggtcctgtggtcaacaccgcctgagctatcaagctcacgtcctacataagaatacaaacacaacacatcagatacggtcctaaaccgtttgaacgaaaggaaactcccttcctttctataaccacaacacaatcatttttcaagtgatcttctgacccttaacaagatccctctcagcctataccaggctacagagcctccacacaagctctgatcaactatggccaagcatatctctgctttcaatggcctaaatccaacttctcataatgatcagtttcaaccgatcaaactcacctatacagtctcaggagcaactttgtcaattgctctaaggtccagactagtcaaatagtcaaccttttccatctgcatatacagactcagagccaaaatcaaacttcatcactaatgatgattcaaggctctaacttcctcagaatacctttctgagcataggactctacagagtccgagcctaataacggctctaacacctccaaaaacacccctcaagataaccccaaaatcccaaaattcaatacacagaaccaacggttagagctcgagtttcttacctctgtggcattcaaaaacaccagggaatagctttccctaagataactcgcccaatcacggcctctttcgtctttagacttcgagctctcaagggttctctcagggaaatccaatctcactatccctcagctaatctcagaaatcaatcggggtatcttacttatctcgaggttctgaccactttctcagttgggtcggaggtgtttagatgaacgatgaaggaaatacaaagctcaaacgctcatcaatggaggttctctctctcgctctcctcttttctctttctctctcagccctaagtgaccttttataaaagcaaaccgtcgatcccacgcacctcgcgccactattccacgcgactcgcgccaatctttctggccttccacgcgactcgcgtggaatcccacgtgactcgcgtggagccccagagggaaaacaaggttcctggccacttcccacgtgactcgcgtggattgccacgcgactcgcgccaccctctcggccatatcacgcgactcgcgtgacattccaagtgggtcgcgccatatgccagaaaacccaaaacttgcattttaagcctcttccaaaggactcttaagcatgatcacattcccttagcccataaacttagattcatgcttaatctaagcttaaacacgtgattaaaattcagggtattacatgtaaggtaaaaaaatccagtttattggacagttacgtaaataaaaaaaactgtcagaagaacatataacaactttattaatcgattatattcctatctaatcgattgtttcagaacaaatataagaagaatacgtagtgtaatcgattatttcctattgtaatcgattacagtattgatggtcagaggttgaagataataggtaatcagttaacttggtaaagtaatcgattatatggccatgaataataattcaaacaaagctatggtcattttaatcgattaacacatgtggtaatcgattgttccagagcccctagtttttctaaccagaatcataagtgttgtaatcgattatcccgactcttaatcgattattacagcacgaatatcaggaaacagagttttataacatgttgcacagctttcaattcttagatacagagcatattaataaaaatacatctttcattgtataaaatcagaccattttgatggtaatacagctttcatattgatttagcaataataaggcaattgggcatttaaaattgcatatgagacatatcacaaacatgctagcatatgttatgttcatctaggatacctagcatatttctaagagtgtaaaatctatccttagcagaggttttgtgaaaatgtcagcaagttgatgatgtgtatcaataaattctacctttatgttacctttttgcacatgatctcttataaaatgatgtctaatctctatgtgctttgttcttgaatgcatcacaggattctttgaaatattaatcgcacttgtgttgtcacacaacagtgggatctcctttaactctactccatagtcttgtaattgttgcttgagccaaatactttgtgcacatcaactaccagctgatatatactcagcttttgcagtagataaagctacacaggcttgcttcttgcaatgccaagaaataagtgagcttccaaggagatgacaagttccactagtgcttttcctatcaagcttacatccagcaaaatctaaatcagaatagccaatgatattatctaatgaaagatctcttgtggttctccactctttaggcaattgtgttggtgttgatgaaccttcttctgtacttggttcatttttctcattgatggacatcttctccaattgaatgttctgttctaaatttcctgcatcatcatcataagctttttcttcttttgaggaattagattcatcacaaattacatggactgattcctcaatgcacatggttcttttattgaaaactctatatgccttgctttgtgatgaacatccaagaaagatagcttcatcagctgttgcatcaaatttcccaagtgattccttgccattatttaatacaaaacacttacagccaaaggttcttaagtgagaaacattgggctttcttcctttatacaactcataaggggttttcttcaaaatgggtcttatgagaagtctatttaaggtatagcaaattgtgtgaacagcatcagcccagaaatatttgggtaaatttgtttcatttagaagtgtcctagcaccttcctcaagtgatctgtttttcctctccacaacaccattttgttgtggcgttcttggagctgaaaagttgtggttgattccatattcatcacagaatttttcaaaatcttcattttggaattctccaccatgatcacttctaattgaaacaattttacaccctttttcattttgaataagtttgactaatttttgaaaagaatggaaagcatcactcttggatttcaaaaacaaagtccaagtgaatctagagaaatcatcaacaataactagtccatagtaattgtgccacctaaactcatagttcttgaaggaccaaacaaatccatgtgtaaaagctcaagtggtctagaggtggaaacaatgtttttgctttgaaaagagatttttgtttgtttccctttttgacatgcatcacacaacttgtccttctcaaacttgagttttggcaagccaataactaaatccttcttaataagcttattcatattatgcatatttatatgacttgctctcctatgccataaccatgtttcatctattttactcaataagcatgtagttttgtgaaacaaagcatggtcgatagagagtagatacacattaccttccctcttgcctatatgaattacctcatcactcttaccatcacaaatcaagcagcagtcttgattgaaggaaatcttgtagcctttgtcacataattggctgatgctaagcaagttgtgtttcagcccttcaacatagagcacattgctgattttggtgtttaaactatcaccaatgctcccttcacccataattcttcctttgttgttatctccataagtgacaaagcccccatctctaattgttagagtcttgagcaaggacatgtcacccatcatgtgtcttgagcatccactatcaagataccaaagagaagagcttgctctaagacacacctacaaaagaaacaaattacttcaaaggaataggtacccattttcttatgggtccaggtgggttagctgttttccttttcttttctacccaaatgcattcaccatttggaacatagaaccatctagcaaaacaatgaaaagttgtgtgacctctttccatacaataatgacaagttacaacattaaatctttttctagagaacctcttttgattgactcttggctttttcttttgcttttgttttgggagaacaaacctgatcttttctatatttttaaagttctttttgtaacccaaaccagaggtgtctccatactatttttgtgcactcaacatttcatctaagtcacattttcccttgttgagtttttccaagatgtcaattaattcttggttctttgaaacttgctgcaaatatttttcttcttgattaaatctgtattcatcaaaaactttttgcaacatttcatacttgtcacttgatgtagaggaagaggtgcacaaacatccatttgatttgtaacaagaagtcagattttcattttctttcttcatgttacaaatttcaatttccagctccattattttggcaagatgttcttccatgctctttttaagcttgctatttgacttagccagcttttttgcttctttgtgtatctcttgaaatgctaaaacagcttgttcaagttcagaagttacctcctcttcttcatctagcagatcatcatcttcttcatggataatagatgttaaacacacgtttgcttcttccatatcagcagatgattcagttgtagaggagtcattatcttcccatgcaatgtaagctcttctaggcttagcttccttcttccctttgctgtcttgttgttgtttcttcaagtatatggaacattctaacttgatgtgaccaggtttgccacattcaaagcaagtataactgctatccaatttcttgaagttgctggtgttgttgtttgatgaattgttcttgttgtttcttgagaatttgctgcccttgttcttcttcatgaatttgctgaacttcttcacaatcaagttcatgctttcatcttcctcctcatcactagagtcttcatctttctccactttgggtgctgcagattttagtgctaatcccttgcttttcttttctgcatcttcaccaaaagttagttgagacagttcaaattcatattcaagcaacttaccaaaaagtgcagccattgacatctttgatagatcttttgattccttgatggctgtgacttagggttgtcatgctctagtgagacatttcagaatcttgatgttaagttcttcagcatcaaatgttttgccaagtcctaggaggtgattcactatgtgtgtgatccttgtttgaagctgggaaatactctcattctgattcattttgaacatttcatattcatgaatcaaggaatgttttcttgaccttcttacttcctcagttccttcataggtgatctccaacatctcccacatctccttggcacttgtacaacgaacagttctgaaaaattcattagaagatagagcagaggttatcatattttttgctttaaaatcatattgaacaattcgtttttcatcatcagtcatttcatcccaatctttgggaatcatgttgttttccactattttaataggcaacctcgggcctttcccaatagcattccaagctcctggatcattggattggataaagattttcattctatttttccaaaagctgaaatgctccccctcaaacaaaggaggtctgtttaaggatgctccttccttaaaggttatttgtgaggtgttcattttgtaaaaaatgcagtgatcttgagtatcttacaagacctagctcttgatgccaattgtggaaaataaggaacactcacacttaaccaacagggggggtgaattggttaaccttggtaaattaaaattttctttcaacaatatcagagtttaaaatcagagtttaattccctttggatctttatcacaaaatacaattgaaaaactttatccaaaaaacaatccaagatttgtaatacctcaagaataaacttcacaaagaagaaaacacaacactcaaatataattcacacaagaaattatctaaactgcagaatataaatcaagagacaagatttatactggctcacctcaaaacctatgaggctacatccagtttcttccactcaacactatagtagagttccactattgcaattatgtttcttaggagcaattacaagcttctcttcctcaaccctagaggaagttcagagatctaaaaccctattagatccttagaagctaaaccacactgagaaacctactcagttgtctttggagaaaacctatctcccttggagaaacactatcccctcttgcaagaaagcccaaatacaatagaatcaacaaaattcaaaattactgcagaaaacttaatacccacaaagaaccaggaaagaattcacctgatgatccaagattgaaatgcaaatgaatgacaaaactcaggttgaatgcaagtcaaatatgcagaacagctttcctagacctttgtgaaaaaatagtttgcttcactaacaaaactagtaacccatggatggcttaatagaagcaaagctcaaataacccagaagaatgccttattgatttcttagaaagctcagaacatcgaaaagttttaatatcaatctcaatctctgttgtgttgaatcacaaaaggcaagggttatatatatagttattttcgtaacgaaaataattgattaagaacgctctagatgctcgtgtaatcgattaaaccgtcctttggttttctcaggatttctttaaacgggttaaataatcgattaacccatggtgtaatcgattaaagcagactaagctaaaatcctgataatgaagtgtaatcgattacatctttgtgtaatcgattaaagcagtcctatgctgaaatcatgtttgtgaaggataatcgatttcatccattggtaatcgattaatgcagcgtgatgcaaaaaaatgaatgtactaaaacaatcgattacaatacgtggtaatcgattaagccagagtgacagtatttttcaactaagtgagtaatcgattctaatatcatggtaatcgattaaagcagtcacaaggccaatttctatgtatgcaatatttcatgtaatcgattaagttgatgcaataatcgattaacgtgtttatgtctgattttccagaaaactgatgaacaaaataattgattatgataagcacgtaatcgattaaaacgactatatactatgttttagaaaacatctagctttttcctaagtttcaaaccgattacttagcttctatatgattcaatgctatatgaatgatatgtaactaaaaattggatcatcacaatgctttcagaccttttacatttaaatcaaaaacatcacttcttcaaatcttgatccatgttgaaagccaaaacctccaagtcttgaaccttgcttgaatcttcacttgatcttcattcagctccgcctcaaatcaacagaaaaggttgtctagagtgtggcgctaaccgcgccaaagacacggccaattcacgctattagcgtgaactctcgcgctaatcgcgcgagactttcaaacctgagcttccaatctgcataatttcacgctactagcgtggatagtggcgctacccgtgccatgctttcgaggttgaggaccctccagttcaaatccacacgatcagcgctgccagtggcgctatcagcgtgatgaaagcgcatcaattagcctggaattttcatgtccacgctaatagcgtgaagagccacgcgaatcgcgtgaaaaaggcgcaagaaaagccttccagttcttaatggcgcgaaccgcgccaacttccgcgtgaatcgcgcggggtcgtggaatctgtttttattttaaattttcccaaactgctctattccattttcgcctgaaccccatccatcatcattaatcaccattattgccttaaaagccttattctacacttatattcccccaaaacccacactccttatcattaccccaatttctgctctcgagttctccatctcgcattccttctcggtctcattttctctctataaccaacattgcatttgctaccatggctggcgacaaggtaaggtttctaaaccaagttgtttgcaatccttctattcattcaagttctgcaccaagccattagggcattcatgaaattgttgtgttcttaaaccagggttgcttgaataaggttaggggtagtgtgcacaaagctataatgatttgtactccttaatagtgatgggtatgaagatatttgttggcttgctaaataaacctatcgttagcatggttgttactactatatctatttggctaatgcaggtacttcacttggtccaaaaatgtggactcaaaactatttgaatttgaactgagcctcattaagctgtgttaaatgttgtgattttgaccaaagcatggatccactaattcgatcttgattgcatatatgtctctgtgctgtactttacctgtagaatgtacaacaatgcattttggttcattttggattgctggaaaaggtgcccataatatgcttaattaattgactgattgtaaatttagagctcaattgggaaagctattttgcaaggtctacttaattgctgaatataaactagaccctaatatagactgtccatttgtgattaaatccactaatgaatgcatgttgaacttgtccacaaactggtttaattgtgcaaaccaaatggtaagctagcttgtgcctgttctgttgaatgatacaactgttgtttggtgaatagaagtaactgggttttttcaataagaaactttgaactaggcctgaacatgtaatgtcctaaatctgggaatcattgaggctagtctcaggttgtggataaaattagttttagatcttgtgcaggttgagctgaaattgtgaacttgcaggtgccctaaatgcttgaaatgtgaattgcttgaatcaatggttaatgttgtgactgtgcttgcatgaaatgcttgaattatgaattgttggtgcatataaggaagctaaatctgggaatccagatggtgctattcttttccttttcataatgtgcatctggttctctgatcaaattggtgaattttgaaattagtttctgcatgaattgcatgaattatatctggtttggtgtatgtaagggacctaaatctgggaatggaaagttcaacattgctgtgaataacttaggaacccaaatagttacctggactgtgctgatattgtcaacataaatattccacttgctgtttggttatagttgtggtgctggaatgaaacacttgttgttctgaaccaagttgttgattaaaagccatacaagaatactgagtgccaattaagaaccctgctaactgataccactgcactgttgtaattgtttatgcaggggtttctaaatgttctaaatctaggaatcatgggcacactgttaaatgttgaacacactgattcttccagatgctgtaaatatgcttgctacttgaactgtgcttttaatttcatgaacattactcacttatgcacagtaccctgagttaattgttgattgtttgatctgatccaatgaaagggacaaatctgggaattgaacctattgaaccatgcatatatctagaattcgttctgagttttagggaaaataggtggctaagggtaagaagagtactacagtaggaggcagcaaacgggctaggctttcagactatgatgaaaaagattatatgggaggtgcttccagaggggaacccagtgctagaggtgatcttgagacgccagtggcagtggctggtcagcttcccggagcccaattccagtgccatcctcaaagaattcttggccaatgttgacccagccacagtagcacggagcagactttcatgggtcaggggcatccaagttcccttcgacaagaagaccattgagcgcttcctggaaaccagatatgacccatttgacgactgtgacttcagccaactcttttacaggatgcagcccgatgccctgacaaagatatacaaggacgaggtacctcagttggccaccaccatccgcagggccattataggcctctacactgcttggaagcccaaatcagggcttgattacataccagagaagctgcggaagcatgaactggttggagatgcagctttctggcatcagttcattaaccacacagtcatcccttctactaatatgactgatgtgaatgtggagagggccaccctgctttacacactccggggtgaaggtaatctctacatttctaaccttctttctaaccgcattcttcatatgatccaggacgccagcagcaagtcttggctggcccattcgtccttgattctgcacctgtgtctccatgcgggtgtagaaatcttggatgacgagcctatggatatgcagattgcatcattgatggaccacaagacttatctagacgctgtgaagagcgctgctgaggagcagatcatcaaagcctcaaagctcactccaaaggacctcacagcccgcagtcctagagatgcaccaccaccagatcagccccagccggcagagccagcagcaccagctccttcttccaccattcctggacatgagccactctacacagactctcctagctatttggccttccaggagtttgtcaggacccagcttacacagcagacccgtatgcttgaggcattatgcaggcagtgcggcgtctcacccagcgactaccaatttccagtgacaccaccaccagccgctgcatttattcctcctggtccctcagatgccgcagatacagagacagccattcctgagcctcctcaggctacagaggctgaggccattgatgagagcgaagagggagaggagtgacaggacttagttttatttttattgtttttctgtttattttggattatgcatttgacagtttgacattctgcacacttttatttttctgcatatatatagttttgtttctaattcaattttgcgcataaaaagctgtttagattaatgtttcggtttggttgcgattttccaaataatgctgaagtgataaaaatttttccaaagcgttgtgaccttatttgttgttgctggggacaacaatttctaaatctgggaatggatgcgcatacgcattatttcgcaaatcacagtcaagaaacaaatgacgtctaacagagattttttcaaaaataaaaacaaataaacaacacatcagatttttcagaataaaaagtgaatggacacagtaatagataggatttctctgatgaaagcttgatgaaatgaaacatagcatgaactgcatgatacataaatagaattgtgattgttggtatgtgatatgcatgttgaagttgaaataatgcttgaaatgaagtcagcagagattgacttgagtctaacacttgtgaggtttgaaccaaacagtggtaaattttctttccgagagactccattttcatagtactctagaacttgaattatttctctggatgcaggtgtgacttgacatgattaaggcagtttcttcttttgaaaaccagggccaaattgacttaccttcaattatttttccacttgtacctctttgagcctgagcctttcatttcaaatgcccaaattcagagccatatacattgaccaacctccttgaggctagagaaggtataatataagtccatgacagcagaaaaacaggaaattgtccatcaaggcatgaaggaaaacaagttgaattcaattggtatggaagaacaagaataaacaagcacagtccagttgaaaaacaataagcctatcagctggaaatctgagaagctgcattagttacttaatttgttatgttatgtcatgattaattgttttaaaaaaaatccaaaatcaaaaagaaaggttatttgttttgttttatttaccatagagaataaattgttgaataaagtaccaggttttgaaaaggatgaacaaggaatgaattaccacaagattggacttagggactggatctagcctcatattagctactattccaaagattttcctacccttagcccagccaagttacaagccagaaaagaccttttgatcaagttgcgcttgcatctgttgagaatatcttcaagcttatggtagtgctgtgaccatgttgactgagagattattacagcttgatacacttgagtgatgagcggaacaaacacattctgtgaggaatactcaagttcactctcacaatttgacaaaattgaaagtgttattaaaagctttgatttgaattgatcatactcggcatgatggttctaggaatgaaaattgtggtttggtttgatcattgatccttgttttatcttgaagttctttctgctgctggggacaacaactttcaaatttgggaattgtttgatgtgttgcaaacacatcttagttttaggctagttttaggttacaatttaattagataattaggaaaatagaatagaataggttagtttgtcatttatattccatttgatctcattttattaccaatttgtgatttcagggcaaaaagaggagatttaagccaaaagatgaggaaaacaaagctgaaggactcgcgcgaatcgcaccagatcccgcgcgagtcatgccataggccaaaatacaagccccagtctcgaataagccacgcggatcgcgccaagtctcgcgcgattagagccatacaccttaaagcaggcagtcaactcgaagactccacgcgatcagcgtggaagcctgcaaggaccagccaaattagctcgaagacttcacgctgttagcgtggaagccaacgccagtagcgccatagagccacaagtcccgcatgatcagcgtgaagtcccgcgtgagtcgcgccacgaagatactgttgccttatttaaaaatatctggttcgaaaattggcacaggaagaggctttgttacccaaattaaaccattctataaaagaaaggcctctgggactgaagaagacacactgggcatcagattttatcattctaaacctctggaattcattcctacatagaatcaaggctagggttttactgcagaatcatgttttctatgacagcttttgtgttcttgatgcctatgtcaggctaaactctgtattgtggttaggccaggaaccgatgtaaactcctctgtaacttgactggtattgaatgagattgtcatgattgttttattttactctattcttaactgttttattcttatttagaactggtcattccatttaagtactgagggttaggattcgcaatagggatgttgggattctaatttctgacctgattaaggtaacaattgttcattgcctagggatagggatgcgtgactgtagaaccttataatatattcttttaaatgcttaacttgatagaattcactaagggattaggtttttgattcaggttaaagggttaattcactaagggattagggattagctaaattagaaaagatttattctctgagcaatcagaaacaatcgaacttgataactagttaagagaaagaggtaggaatcaaaggggattgcgtcttgaccacaattattccgtccattggttacaactctctctttatttgcaatttacttcttttaatttctgctcttattcaaacattcaaccactcaacaacaattctttaaaacattttttttcttttccaattgcttagactgttaattactgtgatttcacaccaatccctgtggagacgatacttacttacccactttattacttgaaacgagcggtgcacttgccgtgttcgcaacaagcacttcattggtttaagggttgaaataatcatgtgattgatgaaccccatatgcaacttttaaactagtctctttaatcctacaaattttccctagagaaacaaatgcgaagaaattaaataattttatgcttaaataatatttacatttatctattgcaaaagcaacacatagcttcaaataaacattcacttttttttttattatgtgtttgtttctttctactttgtatctgtcctcattcttgggtaatttgatctaaaagaaatttgttcatcaaaacatgtattgagttcattcatgagtaagatgaaggaaaagaacaaaagagttgtaaagcctgacgacaaaaagtatgtgccaaaaaatataaccaaatatgatatgtatcatctcaactaaatatttctatctgcaatccacttgaacctaataaacattctctagttttcaccaattttttttcctataaagagacacataacttgcccaaacccttgccatctccatgggctacttctccataggtcctagttcttttactcattgtatacttatagggaaacaactcacattgtacatcactttcaattatgcttatcataattttgggtctactacaacattcagtgcaaatcctgctacaacaacttcaagtgtaaatcttgctggttctttcttttattccccttggttaggaagccaagatgtgatatatgtattcatgcatattatagttaatcatgtggtttgattatgatgaaggtactactcacgtgtcttgttttcatgttatatcttgtttgatacaaatatgacatagaccaactcaatatggttatgtgtatcaaatgaggtcattctccaatctttatcctatagtagcagtgggggtaactctaattcctcaatcatttaataagcttattaggtttctttttttcttcttctacaatttcaattaaactaaggtttatagttgcttcatattttatggaatctacatattcttttatggaatggggagttggggtgcggttagctattgttaatggattcaatatatgcttgtttctcctagagaactccaattatgaacaactatgtgtttgtatattcataaatgcatatgatatttttgcaagttagtcaaagttatctatttttgcttatgcaaatagaatacaaaggacttatattgaaaagaacaagaatttaatgggaaacggccttcaatcccaattgacaagtgcatataacatacaaataaagtaactcaggaatctaaagaaaataggtaaaggccttcaatccttgttaataagagattataacctataagtaaagaaattcaagaatccaaagaaaacaagaaaattaatttactaattacattgcaaggacatgtgcttaattgatttgcacatatattaaatgctcaaataataaatctaggtgattgatttgtagtaattaaatataatttgatattcttagcattgaaagaaagaaagagagtttgaaagtaatgtgtgagttaatctaatattatttttagagtatgattggaccttttcatattatattttaattatattagggtatctattagtgtacatggaaatttaatgaaaggtatggaaaaatcaaatgcaaacactaaaaataatattagattaactcacacaatactttcaaactttctctctccatctcccttatcaatgctaagaataacattatttttaactactacaaatcaataacctagatttattagttgaacaattaatatatgtgaaaatcaattaaacatatgtccttacaatgtaattagtaaataccctttcccatttttttttggattcctgagtttctttacttgtaggttgtaagctcttacttactaggattgaaggcatttttccattttcattggattcctaagttattttatttgtagattttaagctcttgttaattaggattgaaggcttcgaattcttgggattaaaggtattttcccattaaaattttgttcttttcagtagaaagttctttgtcttcaattcgcagaagaaaatagagaactctgaccaccttgcaaaattatcattatttatgaaaatatacaaatacatacaatttttcatcatagaagttccctaggagaaagaaccatatattgaattcattaacaatagctaattgcaccctaccccccactccataaaataatatctaaattccataaaataagaagcaatttggaaccttagtttaatagaaatcattggagaatgacttcatttgatatatagaaccatattgagttggcttatgtcatatatatatatatatatgcatgaaaacaagatataacatgaaaacaagatacgtgagaagtctttacatcataatcaaagagcatgatcatctataatatgcatgaacatgtatatcaccacctgacttcccaaacaaggcgaataaaagagataaccaataggagttacataagaagttgttgtagtaggatttacactaaaaggtagagccaaaattatgataagcctatattaaaagtgatgtacaatgtcaattgtttccctataaacataagtataccatgagtaaaaaattgagacctctggagaagtagccaatggagatggcaagggttttggaaaatatgggtcaccttgaaaagaaaatttggtgaaaactagagaatgtttattaggttcaagtggattgcaaatagaaatatttagttaaaagggatgtacaatgtcaagtgtttccctataaacataagtatacaatcagtaaaaaattgagacctctggagaagtagcccatggagatggaaaataatatttgcttaaaactagagaacttttattaggttcaagtggattgcagatagaaatatttagttgaatggtacatgtcatgttcggctatattttttggctaaaacttttcgtaatcaaacttgacaactcttttgttttttttttcctatttcttgctaaggagttaacttagtatcctttctgatgaacaaacttattttagatcaaataccccaagaatgagagagatataaagcagaaagaaacaaacccataagaaaaatgcaaatgttttatttgaaactatggcttgcttatgcaatagataaatacatatattatttaagcataaaatcattgattatttcaacccacaaaccaatgaagtgctttgctacaagcaaatagggacaaattcacaagacaaagacaatttgagaataaaacaataagagttgagcaaactatgtttttcgtcctttatcttttcaaattttatagttttattccttgcactttttcgagactggtcttagttcttcaacttttgttctgtctatggttttatttctttctattagttcaaccattaactagtaacgtgtttgtacacatgggaacatgtgcgttgagatggatttagcacatgtgtatttataatattttaatatttatattctattaattattagtgtaattaataaattatgtttcttttaaaagaaaccataccacgatcaaccattcatgagccctacttcagcaaaaggcgtaccacttacaagcccacctccaatgtcccaaatgccattccaagagaagaatcatcaacgtcttgaggtacagtgtctatggcttcttcccaaggagccataattccttggtggataaaatatttgtgtggggataaagaaatgcttatgatgttgcatagctcaaagaatcatggatggttgttttgatgttgcccttatcagaaggtaaaatgtgcttgtctccccaatcttttatcttttattttttagtaccatttttatttatgattttgtttttctaatgttgcagaggaggtttatggggatgcattgtaataatttttgttggcctaatgagcttgataaagacattaatgaagttgttgtagaggttgttgaggaacaaaggaagaaaattttgaggctacaaaaaaaagttgaatgggaaagaaaaataggttggatcttggttgttgttgccttactgtcttgcttattccacatatttggaggcttgatgtctaatttttgctacccttgtatttgggacaagaatttccaacacaaccaaaagttcaccttggaaaacaaatttgatggtttgctcttaaattaatcaatgacacattttttctccaagattggttcgaattggcaagtgcaaataacatacaaataggcatcattaaaccatcaatagttacatacattaaaaaaaacacccaactgtcaattactattgtgccacatcaataagttacacatgacaatagagtaattggcacttgcatcaacatgttgacaaataatggtagatatcaacgaaaaggaatacaaccatggacacaataaaagttgaaggactgagactagtcttaaaaaagttcaaggatgaaaaccataaatttggaaaagataaaggacgaaaaacatagtttgctcattggagttccaaacttttggaactcaacaatggcaacagtgacaatttgatcaaaaggaataaaaccactattttactagactaaaacagagtaattgggagtccttaggtttctgaattatgtcttattcataatataataatcaaatcaaaacaaaccttaattattcattagaagtgaataaagaaattaatgcaaaacataaagcctaattactagctaacaataagaaattgtaattatcattgaccatacattctaacatgagatgattatgttgatcaatctatattaatcacatggtttggcattgcatatatgctaataaaaaaaggaatataaatgtatgaattgttaagttgtagtgaccaaatataatgttagaataaatattaagggtaaatgttgagttgtttgtgatttgtggtagtgaattaatttaacccttcatcccatttcaaatccattaaatggtttttaattactcatgcattctggtttcctatgtagactactcaattacacaagttaataagaaagtcaacgtgcaatcagttaggttaaagaaatatattgttaacatacaccaaaaagaatgaggaaaatcaactatggtctaaaattgatatttacttacattgtaaaaaatatgcagtttcagattccaaaatgtgtgctccaaagaaaaaagtcaatcaaacctctgaaagataagagtcaattaggcatctagatttaaatctattgttaagagaaatattaattatatagtagttttgatacaacacaacaataccaaagccaaacttgaaattgtctagaaaattcaagtttattgaacttgtcaagagtaattaacaatgcgagattggtgggaccttatgactaacaaagcagacatctatgtgtcaaaagaatgatgagaccacaacaagagtcttgtagtcatataaaagagtaaaacaccatttaaaaaataagtcagatcacgactactccaaaatgtttattactctattgcaacaatttagagggcacccaattgcatgtccatagatttcccttaacacataccacaatcccaaaacaaaatcctcctcatcaaatattaaataacatggttaaaatttgagcgtaagagaaggaggaaagaaagttatgtacctttaagaaatgacccatcttgttcttgccaatgtcgaagtaaaaaactttaaaaaaataatttttaaaagaaatgcatcaaaaagattaagagggatggacataaataaatattaaaagaggacctacatgtatagaaagttagaaataagagttagtgatacatgagagacacaagataagaaagagaccataatcggattgtgttgtgccacacatagaaattcatttatcaaaaagaggatagattttaggatttcaaattttaatttgagcctggtagtgtgagttcatgtgttttcttggttccaacttttcttttcattgttgaaaggctacgcttgtcaggtgttgggtatattgaaatttaaaggcaaatgcttccacaacgtgacctaactcatcattagttaatcataatatatatgagatttccaaagttattaatagaaatcgtagtttataccttgtcaactcattttatgaagaattatgtaactagagttagcttagttagttagtttagttagttatacttagttatgagttagttacacttacaactaactatatattcagctgtaataaccaactttgcaagttaatcaattcatgttattcatttccttcaatatcagtttctcactttaactatctttgcaagcttcctctgcaagctttgcattcatccatagtagacatgaggtttatgatggtataaaatccagaagaaaatccaacaactgcactagtttttccagttcttgattcaataaattatagttcgtggagtttatcaatgcttactacattaagtgcgaaaataaagttgaatttgttgatggatccattcaaagatatgcatcgaaccttactattcatacatcttggaagaggtgcaataatatggtggtttcttggcttattcacccagtttcactttcgattaggcagagcatcctttggatggatgatgcacgagacatatggaaggatttgaagttgacgtattcacaaggagatttgttgagaatttcataattgtagcaggacatggcaactatcaaacaaggtgatcaatttataaatgattacttaacaaaattgcatgttatttgggatgaattgaaaagttacaaacctgatccattttgttcatgtgatccaaagtgtgtgtgtgtgatgctcttactagtattatgaaaagaaagaaacaagatcaagtaatgcagtttcatagaggtttgaatgatcagtttaatgctgttagatctaatgtattgatgatggatcattttcctagcatagctaatgtcttctcatatgttattcagcgagagaagcaacttgcaagtaattatataatgagaaacaccagtctgattaatgcaatcaatactaactcctccaattcgtgcacttactatgataaaggtaatcatactgtcgataggtgttatagaaaaaatggttttcctcagaattatgcttccaaatgatgaagaggaaatcaaagtggcttcggtagatgaaactcaggaagaagaggaagtaagttatgtacatattggggtttcattaaccacactatagatgaatgcaacagaaagcatggttacccccctggacacaaattttttaagtctcagattcaaatattaacaatatcagtgcagaaaaggaggaatgtgatagcttagcccaagaaaggaaacaagaaacacaagatgaggatctgaagctagcctctcagcagtataatgctttgatgacattgttggaacaacaaaacatggtttacaagaatccacatgtgaatcaaattggtacagttagcaataaaggtagtgtactatacatcacttgtagtgtaagcaagaccagtcaagatgagtggatccttgactcaggtgccatagatcatgttacaacctttcctcatttgttttctttatgtaaaaagataaaccctgtcattgttagactccctaatggtcatgcagtcactgcaactcatgcaggaagaattcaattttctcaatttttatacctagaggatgtcttatggatacctagtttctaattcaatttgatttcagtatctaaattgatctattctctgtcttgcaaactaatccttatgaatgagaaatgctttataaagtatttatagaacctgcataggattggtacaattaatatggtagaaggtctctacaaactcaaaatggttcctctcaagccttatagggaatagagttctaattccactgttgtctttatttgttctagtgtttctaggatttcatctttttcatgtaataaaaaacctatggatttatggcattttagacttggtcatccatcttatgaaagatcggtgctgttgaaacggttttatcttgttcttatattatataaacaattcatatgtgaaacatgtcatcattcaaaacaaagaaaattgtcttttcctagcaatgattctcattcatcttgtactttgtctcttgtgcatgttgatatttgaggcccttgccatgtaacttctttaaacggttacaaatatttcttactattgtagatgattattcaaagtttgtttgggttttccttatgactttaaaagctgaaacacaatttcattttaaagaattttgttgccaatgttgaaatgcaatttgggtcaagaataaaggttatcagatcagacaatggatctgaattcattatgaaatagttctatgatgatactggcattatacatcaatgttcttgtgttgaaactccccaacaaaataggattgttgaaagaaaacatcaacatctattaaatgtcactcgatcctatattttagtctaatttaccttgtattttttggtcttatgccttgattcattctgttgtccttgttaattgcatgcctaccccattccttgataatcaaactccttatgagaaactacatggaattttttatgatattgaatccttaaggttcttcggttgtctgtgtttttctagtattttgacaactcatagaaaaaagcttgacctaagagttgttacttctgttttcttgggtttcaagccacacacaaaaggataatcacttttgatctcaagaccaagcccatttctgtctctagatatgtcattttctatgaagattgttttttatttactgatcaaaatagatcagaccctatcattgtcctacctatgcctactccttcatctaatgccattgaccaatctaatgattcatctttagagctaacatgtgatcctgtcatgtctacttccaattctgattctgatccctcaatctcacaaccagtcattcctacatctagcagacccattagacaaattcacagaccaagtatgaagacttacatgttacatatctatcatcaattgttgccagtcactctataggtactagtctttatcctcttagttatgtcctttcaacactaagttgtccctttcttatcaccatgttattttatctatcacacaaagtgttgaacctcagtcatgcaatgaagcatataaggatcccaattggattgaagccatgaatgttgagataagagcactaaagcttaatgatacctgggctctcactaatcttcctcaacacaaaactgacattggttgtaaatggtatataagatcaagcacaaatatgatggttccataaagaggtataaagccaagctagttgcaaaaggatatactcaggctagtggcacaaatatgatgagtgaatttgttgctaatcccacatcagaccacaaacaagctgcttttcgaatactcagatatgttaaagggactccaggtgtaggaattttctgtctgttgctagcaccattcatttaaaaggttttagtgattcagattgggctgactatcttgatactaggagatctattactggctatgttgtgtatttggtgatttattgatttcatggaaatctaataagcaagctacagtgtccagaagttcatttgaagtcgaatattgggccttagctagtgcaacttgtgagctacaatggcttgcttatttgtttgaagagtttaaaattgattaccagcatcctgatatattgtactgtgataataaatctactttcatattgctgtgaatccagttttccatgaaaggacaaagcacattgattgcttgccacatagttcatgagaagattatgagtggccttgtgaaacttattcttgtgtcttctgcaagccaattgtcaaacatttacaacaagactatcatccctagtgcttttcagttcctgtattccaagctaggaatgtctgatatccattcctagcttgaaaaggggaggggctcttagcatgaagcattatgtaactaaagttagcttagttggttagtcaattagttatagttagttacacttacgactaactatatattcacatgtaataaccaactttgcaaattaatcaattcatgctattcatttccttcaatataatatcaatttctctctttgcaagcttcctctgcaagctttgcattcatccatgacatacatgagctttatgatcaacaacgattgtaaactatggattgatataaataagcatcaattacatgtaaaaatttaataataaggtaaaaaatcaaatatattattctcaacaagtagttaaaaacatgttccctatcctgtgtttaggcaatagtttttcaatcgttggagtcattggcattgcctaaagcataaaatgttgtagtatatatatatatatatatatatatatatatatatatatatatatatatatatatatattctaataatagatatatttatttatctttagtataattttatcgtatattactgagacaagttctaaattagacatatatattttcaaggttggggtatgagatttcaatttttttttttgaaaggcaataaattataatattttaaatagaaatcggattatgcaatttaattagtaacccacaaatttgaccattaattcaataaaccagccagtgtctttattgaattaattaactattcaatattaaaactgtggtttttgcaactcggatttttataagatagaacaataagttctaaaaagatgagatagaccgtaacttctattcctactactaccatggaacagtacagtgatcccatggaagaaaatgggccgaatgctatcatattccattacagtgacgattcccaagtgcaaattaagagcatccttatattatatgatttcaattttaagccattcaggtctttcattaaaggacatttcactattattaaatagttaaaatgcacaaaaagtactctctttttatcgatagataaaaatttctttctcgcaaatcattgggtatatttgaggcattttaactcattacctactactaccacggatagcccttgctcaattgattgtagataagaaaatacaataactattggagattttacatctactagtaacatagttaaaatatagtacatgtaaatgagagataattcccactagtttttaaagtctttgaaatccaaatttaaagaataatcgccctctatatatgtaaggctccattgtgaagttttgcaatatccacaaatcaatattcaccacatacttgaacaaacaaggctagtgtattctacttgcagccataaggtacgtagcatcataggaagatgtagaagaacaaagttgatgcaaatcctgaagaatttaacgatgagatgaaatgagttgattcttcattggatcggatcacaaaggcagagttcctcgcagagcttcaactggttcttggaagcttctatttcagtataggtaaggaatacatgcatcttgctcttacctagtttttatttttgttctagatcaaagattacatcaactcacttaatcaaaaactaatttcactcacaactcacagtacgtgatattatcgctggttcagaaaaaattacatatcgaaagaatcaaacatgtgataactatttaatattatctcatcataataatagttcaatatgtttttttatgctagtattgacttaaaggaaaaaaaagttgaccaatgttataagatgatactgagtagccaaatttaggcaccccatgcatgtgctggggtttagccttctgttccttaataaatttatttttcttattgaaataaataaattcatctgaatattagttaataaattaagataatattcttaaagaattataatatttaatattaatatatttttatcatatttaaaaatattatttttaattctttaagcatagtgtcgttagagttttttttaagagtatttgttagtatttatatcatcaatgatgcagtaaaatcatcaaagtttatttatattataaaagcatgaaacgtataactaacgaaatccctggacggggcttcagagatgaagtgatagaacttattggaaattaaatagaagcaataaccgatagaaaacaaataattattatggaaatattataagaattgtaaataaattaacaaagggccgggttcgaattatacataaaattattaatattagatatatcagtaaaattattttttaacattcatatacaactgagtcaatcaaggggtgctaagttgattgagtaagatgtatgagtattatagaccttttgtattatgcttaatttatatggatgaaaaaaatatataattcagcaaaaacaattcatatataattacattattaaaattaagagtttaagtaaaatatgcactaatagaataaatgtttatttacagggttacttaataataaattgtgatggttaatttttataataattattttaaaaatatatttaggaaaattgataattggttgagtaatttttttacactaataatatagtaaaattgataagtgctttattattattaagcatatagtaatccccttttattggctgcaaatgcgactgggccgtttacatatagtttttgtgcaaaacaactgagcatgaccttttcccctttttttaaaagattagaaccggaaaatattattctgccaaaaaaaacatggaaattattaattaaaatagcaaataataattgaagttgcacattttttcatcttggatgtgataaacaaattttgtacagctgaaatcaaaagaaatatataaaaagagagagacgtgtaccatgtttttcgcgtaatttttgttaaattactacctttatttttttgcttttaatttacaattataaccaataaagtaaatacatgtgtactcgtgaaattccgtaccataatttatcctactaaatacccaaacttgaataaaatttcagtatattaacactaagtattgatttggaaccttttttctgtctgtacaatgataataagatttgtttacattaaataacatttgaatttaagacattgtacaaattacttaaacaagatttaactctagtaagtataatatttgttttggactttagtaaaaaaaaatttgaacattattggcttagtttgcatcttgctcttttattttcctattcaacttggagagttcatatttaaattaacagttttttggtgtgttttagtcgttattataaatgaaaatttgatatcaaaagcatacaggcaagtaaaatttgatattaatattttattatatttctctattcatctcttcgaccgtttactttctaacctatttaactcttatacaataaaaagtttattttttaagcatatgaaagaattaaaaaaaaaagaataagaataattatacttgcttagtttattacactacctcaaaaagtatttttttcgacagtaatattacgttagttgataaggaatcgtctaaaaaagacacacgctgacatttttataaataaatacaatcaatttaaaaactgtcttaaaaactactattctagaacgattttgcaaacattgtctttcaagcattagtataaaaataatatttgactatgtttttataaaacccgtctttatttcctttttatcactttcaaaatcgtctttgtgttactgatcaatttttaaattctctccgtcgcttcactcccttgaatccctagccttctcactttccccaaacctctctttgaccctcactctcatccccacctcgacggcctcaaccctccgggcaacatcacgaccaactcatccccttcaagttccccggcttcattggtctcagctggcgcatttcaaccgtttgatcttccctatctgacactctagaaactcagatgttttatatccttaatcgccttcaccccctcctcatacgcacgatcccgcagaggatcatcacccccctggcccatcgagggtgggtatttattagaaaacaagtcaaacattttgtgacttcaattgcatttaaatgtgtagtggaatattaatattaaaattgttgaaaatgaaaatgatggcaggggttgaatcagcagaagtagatctgaagaagtgggaggtaagcgtgaaggaggtgttcgagacagcgaagctggtggaacacgtgtacaagaggataaggaagcatgcaatgatttttcggggacgacaacccagtccttcgctctacagaattattttcttaaataataataaatacagcgtctgattgatttgaattatttccattgcaggtttaatttctgctttgaaatcaaccttctttccctttttttattgtgtctcatttgcctttttttttttcctcttttcttcatttatatcatgattggttgaagtttgaaagctgcgccctttttcattcacgttatattttttgtttttttaatctttaatttgtgtgcggagaaatatttaatttattaataaagccatggccatatttaatttgcaacattttaaaaataattttctaatattttcaagatggtacgaagagactacgagttgtgttagcaaagatttttcgatcttaagagagagcagaagaccagaagcaaggtagatgaagagaatttttttttgtgttttacatacttttttatgtttcttctccttacgtgtttatgttttcttctacttttttattgacttatgttttcttacgtgtgttttttaatatgcgaagagaaaatcttcttaattgcattttatagggtgtttgaaagattcaatgaaacatttttaccaacacacaaatttcttattcttattggtgcttttttttatatagaatttgcaattgatgatataagaaaaacttcaaccaagaaaaaaacagcaaaggaaatcatttttatattggtaaaagaatcttattaattatcttcaacaaattttcaaatttgtgaaagaacttgcatatcaagacagaagaaggaagtagtgacctatatttaagactttatttattcttttatatgtaagttaaagtcaaaattcttctttttcgttcactttgtttcaaggttttttttttaaaaaaaaaattaatttgaaatcaattttttttgtcacataagagttgatgatgtcttttagggggttaaataactccatcctaaatgacccaataaaattacgtaagattttgtgcataaaagaaaattaaacaaatgtgtgcagttttattgaaccatatgggttgagattgtttaatcctatttttagttgggattagttagacaaaacctttttttaatggttttattgaagatgatatgagaagattttagcaagaatcacataacaaaataacatatattaaaataacacacaaaacctacaggatcgtttatcaaataaaatacaagtcttactcttatttattttttatgtaacgtgttggaattttaatcaatcaacaaagagtcaacaacatctttggaaactagatggtccaactaatgcgggacctcatctaaccagtacatttcatgagaatcaaaagcgaaatccgctaaagcatggattagaatgttgccacttttcttggtaaaaagaagatcttgattttgagctacacattggtaatcttagcagtcaagaacaatgttgtggaaatagtttctcccaacattggatttattcctccagtgattgtataggcctttgccatcggtttcaaaaaaagcctgaaagaagcatagatcatgagccatttgaagcgcccatataaaccctagcgcttttgctgtctccactaaaaattgggcctccgtataccttatggcagcacccaccacctggccttcatggtttcataatgcattgaaattgatcttgatgaattcagattcaggtctctaagtctctttcaccccaccttgttgcaatccaaagtcgttatttgttattatgcttgaccaataacgtgaatgaactcccatttcttcttctgaaaaatccattggtttctactcatccatattgcccacatagtatggtacattacaaccagtccttcttcatctcccaacgtaaaatagcgatggatccactcaccaagagaagtcggagagtctccaatacggatggataaatgagaggcaaaccaagcattccttgattctgggcaagttaaaaagttatacactattgttttcgttttttacccccaacaagagtgggtcatcaattgcataccaggtttttacattttgggattgcaggcacgttccattgctttccccaggttatcccatggagtgaactcaaagaagcttcatccctatcaaagctagattttacctctatataattaggcttgacatgatactttccatgatgagtatgcttccatatcaaggaatctggtagttgagtatgttgtagaagaaaataacataagaagggggttgaattgtgtatttagaagattttaaaaacaaatttaaaaccctttgttagttaaacaagaaagcccacaaggagtttacactgcttcgtctcaaccacaagactacgtctagcttttacacttgtaagctctaccccaaatttgacttaaaatcagtattctttgtcctaataagttactgctagctctaaacaaatcaacaaaatttgtcgaaagtttgctcactaactaaagtatgattgtctaaaaaatgaatatatcatttaacacttttagtttttctcttaaggtatacaaagtgttttgagagcttagtatctttacaaaaatttacagaaaactttttacaagaaagaatggaagaatgattcgcatgaatttttgttttggtttcttcaaaacttcttctatatatagccttcatctccaagtatttgttgtctttcaatggttagatacttcactttgttttttgtctaaggtcttgagtccgttgaagcatttaatgcacatccctttttcatgcaaagtccatcctgaaaggatagtgcatcttgtactcctgctggaaagttacttctttcatcatagcaagtctataacagcagaacacgtcttttgatgaggatcaggatcttctagactgtggacttcatttattcttcataagactttggcagatcctagaaaaatattttttacatgaaagaatgtcagacatagagtattaaatgaaggtcttaactacactactgaaatgttatatcaaatcgtcttattaatgcatcgtctgaaaactttatatgcacagagacagatcatgatctgatagcatatcagatatggcttttatcaattgtattttattgcatctaatcaaaataattaggagtcatgattcgtctttaaaatataaatgttttttgacttaacatatgtttaataggaatgatcaaaaaattttcaacaatgaagtgaaaacatacctctaatcaactggtgcttccagcttcatgattcatgattaatcaggtccatgactcaaaaattttgttaaacctaaccggcttcttcttggggagtgagaatactcgtcatattcgagggccatctatctttatacactttaacttaggacccatctccaatccccaatagacttcctatattcacgacccatttcaccttataaatactcaaccatatgttgctcggtttgtttcctttggccgcatccaaagcttcacatcttgggaaatatcgggctttaaagatctttgtgaagagagagtttccattaaggatgagtctccactactccttggccaaaagagccaagttaaaggctttgacatccttaattaaaacccattccactatcatttttattcttggacaattttttcaagctttgccaatgaatacctcttccttctttgtctccccccaccaaaaaaaaatcaagcaattaacccttcaatctcatggcacaaagactttggcaactccaagcaactcatcatataagttgtaatcaactgtacaaccgccttgattaaggtttttttcccatctacaccactttgggtgccaaaattccccatctacaccacttttaattttattacccaatctacaccagtttttagttgctgtgagaagttgggagtgggaacccgacttctcaaccgcattttgcttttttttttttaagtttatattataaaaaaataaaaaatttatatttgttgactgtgggaagtcgagaattcacaacccgacttccatacagttttactttttttaaaaaagaatgttgtaatttttttgaaaaaaaagtaaaaatatattttattggtttaataattattagttatattaaatttaataaatatttatgttaaataaaaaaagataacttgattaaaaaataagtagatatataattatcatatctcaattatattatacgttgaaattaaaatatttaaaattttaaaaaaataacgtgattaaaaaataagttgattaaaaaataaagtggatacataattatcaaatcttaattatattatacgttgaaattaaaatatttaaacaacgaaaaatattaacaattatatagataaacataatcgtggaaacctaataaaataatggaatataaaaataatagtaattagagagacaaacacaacaaacataatttaaaaaacgaaaaaaaaacatagatgattttacgaagaaccacaaacacaaaaatatttattaaatttaatgcaactaataattattaaaccaataaaatatatttttaatttttttcaaaaaattataaacattcttttaaaaaaaatataactttttataaaaaagtaaaactgtatggaagtcgggttgtgaattcccgacttcccacggtcaacaaatataaattttttatattttttatgatataaacttaaaaaaaaaagcaaaatgcttttttttatgatctaaaattgaaaaaaaaaaagaagcaaaatgttgttgagaagttgggttcccacttcccaacttcttacagcaacaaaaaactggtgtagattgggtaataaaatcaaaagtggtgtagatggggaattttggcacccaaagtggtgtagatggggaaaaaaaccccttgattaatatctccttactagccttgaacaaatacttttccttccatcctttaagtttcttccaaaccctcaattgaacaaaattgaagacttagaacctagatcttcccaccatcatcagtaatcccaaatacttctcatgaattttcacattaagttaattgatttagaaagtgtttagtaagattattaaaacctcatatttataaatcaatacatttagtctcctattttgaaaataagcaattttgaccctttcgtcagttagtcgttaattgatcatctaaaatcaaaattttaactttgatgtagggcattagtgctaacgtgaaacttatgtagataaaatgaagtgaaaaataaaagtatcttaatagaaattgaactcatgactctttattcataaacaagacaatgaaccactaacacacttggtttgtttagttaactacattaaaattattttatattgatcattagttaagagttattagtttttttcttcaaattatcaaaaattataaattaaaaaatatttaatatataaatatttttaattttattttatatgtttttattttgaataattatcatattttttttatcaatttttatttaaattttgtaaattaatatgtaaattatttatataatttttttgtaaattaattttaatatacaaaattatttatactctaattatttacgtaaaattaaaaatatttatatattaaatatttttaatttataaatgttgataattttaaaaaattaataactcttgactattgatacataaaaaaataatgttaatatagttaacgaaacaaaaataaatattttatcctcttgtcttgaataattttatctaaataatttgattaaaaataatttatatattaaagttaatttacaaaacaatttaggtaaataatttacatattaatttatgaaatttaattaaaattggtaaaataaaaataaaaatatgtagactattcaagataaaaacatgtaaaatgatataaaataaaatcaaaaagatttatatattaatattttaatttttaaattttaataatttgaaaaaaattaataactctatactaatgatgcatagaaaataatgttaatatttttaattaaaaaaacaacttagttagtggtttattgtctattttatgaataaaagaacatgagttgatcaattcttattgagaccattttttatttttaacttcatttaatattttttaacataagcatatgtcaacagtatgcataagttccatgtcaatactaatatatcaatcaacaattaatggaagaaccaaattgcttattttgaaaagtatgggaaccaaaatcacaaatttaaaattataagaaaactaaaattgtaatttaacctaatatttataatttttgaatttgtgcgataaatgagactaagcataatatttgaatttatttctaacaacttattatcttaaaaactagaaccataaatttttaaattttgtattataaaaaagtgataaagattttgtgattttactcatattatttaaaattaatttgtaataaactaatatcattttaaatcaaaattctccttttaaaaaatatagaattaaattaaataaatttatattgtttaaaatcatttttattatttaaatattttattaataataatattttaaaacaaaatttttttatttataattttaatcaaattttatttagtgaccaaatattttaaataataataaaaaacttaataattcatttaaataaatagtttgacattaaaaaaataataaaatgtaaattctaagtttcataataacatttaaaataaacatgtatttctagtgtcttttcccataataaattagtaatattaaaataggaaaaggatttttaaattaaataaaaggttaaaaagaaattttaaataaattagtgagaataaaattaagagaaaaataatagcttataaattagcttattttttataagttacttcaaataggttataaaaaattaaaaataagttatgagttactaaaataagtatgagtaacaaaataaagtgttaaagaaaaaaatggagtttaataaataaataaaaagaagaaaattggggtaaatacctagaaggtgtgcaccaatgataagtagttgaaccttttaagcatatattagataacttttttttgtttaatcatgtgtacatcaggcttcttatttaacaccaaccaattctcctctattgggtcaatccattttggaataaagtagtacctttagttggatatccatgtctaaccgagtttgaacccttgacccctagttaagggatcaaagttgaatcaattgtgccaacaaattttggttgataaggatattttttaaatgaatttaaataacaataataaatactaaggcaaagtgggatatagaaagtaaaaaaataacaatgattgacataagtgatagtgacttacgtttcttaatcaagtaatttagggttccagtcttgattgaatcttgggtatgaaataaatcgcgttgggagagatatattcaccatatatgtactcatgttttctgatgaagattagtcaccgctttcgacagggttgcttcgtaccaataggatcataaataaaagtaaagtggggagtgtaattagcaatagccttctgtcttagtggccggaaaagacaaaaacgctgcgttttggtccctcactcttcacagttcagactccacgagccctagtccgccggaggtgtgcgcctgtgcctgttcgtcggactccgtggatctcgctgtcgcggaggatactgtgtcctttccgactctgcatcattttcaggtagcaacaattgaataataattgtttcttttatttcctatttttgtaaggaagataaaaattgttaaaatgcattgactgaatcgaagataacttgtttcactcaagcacaatccttgaaatttcctcaagtgaatgaaagaacaacttacatttttctttctttcatctttgtgttgtacgttagtttcacctattaacatgtatgagtggatgatgtttgataccaatacatagataggggtccatttcgtgaggtcgtagtacactttacgcggttaagaagttgtggttatttggttgtaagggtctaagggattttctttgggtgggtgattaaagtgaaagcttattactagggagtctatgctttatcttcttctctgttatttctgtatctttctcatgcactcttggcacaccttgtactctgattcgaacttaataaaattgtctttgcctctcaaaaataaaataaaatcgaaacagattaacatgtacctcaagacttctttttacgtgttaagctaaataattctgtcaaacgtgatctatcttcggggttcctctttggtcttgcgtataatctaattaaatgtagagatgtatttacatgggacaaaatcagtgaggatcctgtaccttttttaggtgccatttggtcgcattttctaattcaccacacttacaattttggaattttgctgtatggattgatcaaattatgttagctatatatatttttaatagatatataccaggtcaactggttagtgatcctttggtttgaccactgatccattaatccagtgtcttgattgagtctatgaccaggtcggtattggatacatgtgaaaccaagaaattcccaggaaactaagcaaaaagaaacagttcccttgcccctttctctcttgccattcatgttagcagcagaaggatttttcctcttgctggctgttatttgcacagtcgccctatcttactagttctcatctgccattgtcaagttttttggggtttctttattcttctttctttatttaggccatcttctctatttttttggtatctaatatgggaaacctactctgtttgggtctttggaaattgcatttatgtgtttcaatatttacatttatacttttaggaatttgaaggtctgaatctcctcgaagccttcgtgaaacgccctgcacccttggaccctttcgtgaaatcttccttgctggtacagtagtgcccagtttcattcattgttggttaattactacttccaacttgttccttgtggcagttaggttagctataaattaataaatgtacgacaatgcagaacaaaagttacttaagattcctttcttttacctgttatggatcaaatcttatgtctttttttagaagccaaaatattttattaataaaaggtgagaagagaagcacaagaaaggtgatgcaactattatgcaatgattgaacctactgcattactctcttgataatcaataagaaaggatggtcttacacaaccaatttcattatttgtaagtgtaactctgtagcacagtgattagtaagtaagctgacctattttacaaaataggtataaagaacccagtaagattgattatgtgtgtgcattcattggtcaagcttggcctcttggttgccagacacattctcttctatctgagccaagttggtttcaaacttcaatcttttttttttttttgttttatcgttagctgggcaaaccataatccatgtctatagcctatctaagattctaaagtgacaggatcaaattagtctgcatttgttttaatattaattagagaatcaattctcacatttttttataaggaaaaacatgtttcaatataaatctactgttttagttttgttgactatgtataatccatgtttttggaccacaggcatatgttatgctatggtgtttttatttttaatgaaattatttttgccagtaaaataaattaagtctctttttaatttgtttcattcacaggaactgcattttatatcataatgcctaggaaaaataacctaaggaaaaataatataaggtttgttgatgaagaacatcatgatgaagcagaacattgtggtgaagaagtgcatcattatatacagcaattaataaattcgctgaataactctcaatctgaattacatggtactgaatctaatcatttgaacaattcagctagcactaatgctgaacaaggtaacattattgtaacaattaacttttgtatttataaattttctagaataaatttatgacattttaatgctttcaaattaggttcgttgaaaaccagaaatgttcgtgggcctaccttactaagaggtatatggaccatgcctctggggaagacaattgatgtgcaattcaatagacgtaaccaagctataggaaaggaaggtagaaagcttgctagctttctacgcattatagctagaaatccagagttagcacctttaaacatagacgattggagatgttttgacaaagaagaaaaaaataaattggtggagcttgtgagggtatgaaataacttttcttaatgtggcaattttcatttatttttatcatgcatggtatgacattgttactgcttgtgtttttgtagaagaagttctcaatccctgaacgtggtgtggaatttgtcaaaaaatcacttggaaagaaatggaaagactacaaatgtgatttaaggagtctgtatttcacaaagtataagactaaacatgccttattgaaacaccgaccaaatcatataccaagggatcaatggattggtctcgtctcctattgggtttctgataaaggaaaggtaataattttagaaaaagcttttaaaagacaaaaactcttattgtactttatttctctttagtttatgtaaatatattatatgatgctatttttatattgcaataacagaggcgtagtcaggcaaataaaagcaatagagcaaagcaaaagatgcctcatacaggaggatctaaaagtattggtacattaatgaatgaaaaggtattgaagaataggttataaattataatactcctatatattatcaattcttaaaaaattctttaatataaattcttcattataggcaaaagatgggatagagcctacacgagctgaagttttcatcttaactcataaggaacgcaaagatggtagaccattagatgaggagtctataaaaacactggtaaggtttgtctatgaattttatcttttagaagttataatttttttatcattatattatcttgaatacttgttatgagtttgaaaacttgaatagtaatcttaattacaatcttaggatttgctacaagaaaagttgagcaatggagagacttctgatgaacaagatcttggcagtgttgcttgggaaggagatgtgtattctcaagtattgggatctgaaagaagtggctatattcgtgggttaggacttggtcctactccttctctgttatggggtgataaattttcttcgggaaatatttctatgaataataatatgtctaatgagatggtccaaaaattagggcaagagatgaaggaattaaaggagaggcatgatgaagaaatgaaccaaatgaaagagttgaatcaaaagcaagttgcagaattgaccatgatgagacaaaatcaagaaaaaattatgttagaattatctttcatgagggaagttatgtgtagatttatgcatatggagtcactaacgcctaactttcatagaagctatggacaagtaagactttcaaagctttaaaccatcttttttttatttattttaatttgatattgtaagacaacttaattatcttacatctttatgtttattaggtctctgattctgattctaatggtggtcgcgaacgagcaccacattagtcatgtcacttgcatagtatgggggaaatactacagattatcatggtattaaacttgtactactggatatacatgaacctgttattttttaacttgcggtgtgaattatgtatatttgaatgacacattctttttattttatcctttcaggtcatacactttgattttcagaaatccagtcgttgaagacttcactaggactataagccggagtggaatattttgtttatagacactacttttgtatggtaaatgtgattagacttgttattggagaattgacactagatattagatttgtatggtattaatactgtgtcttttcacgttcattagcttgccataatggttgatgcttgtctttctttttgtgaatttaatgaaatacattgtgttttaggaattatctggtagtttattagattaacacagtattaaccattacacaaacactgcttgtttttttaaccattacatgtatctcctttataaagagttttagtgtaagatgtaagagagtttttcaatatacagtgttagtgtaatgtttttaaaattaaaggggactagtatagaaaataaaaaagggtgagatgatgtgtaatttgataaaagttaaggggtcttactataatttgttatattataaaatacaaaaatataaattttaccggcaatagatagtaatggctaggaaaatcctatttgaacttttagtgaagacaacgaccagtgtgctacaattttaaaaaaattacccaaatgcaacgcgaataatagtatttcctagactgtcatgttacctaattcgcttcaaggcccaacgaaataagtagctgacgtggcgcaattttgttgatcacgtatttcgctataggggccagcgaaatacgcggtcaacaacgggcagtacacgtggggcgacatgtatttcacttggttcccagcgaaaatacgtgtaatgatcaccaaaaaaaggatcgttatggacacgtggtaggcgtggacgaattcgctgtaggccccaatgaattacgtctatgtgacccattatttaaatccctcccccctccttcattctctcttagtgtgcaacataacaagctagttttgttttattattttctattatttatcttttgtaatttattattatatatttatttttttaatatattatttatataattttagttgttaaataatatataggtttagatttgaaacattaggttagaagatatttagttaaaatttatgattgttaagttataggataaatgattatttcagtttatgattgttaggttcttataagtgatagacatattttaattatagattcattaaaggagttgtacgctaaaaatatatgtgtaggaagttgtaggtaaaaatatatgtgtgaacattatatttatttaatttgataaaaatattttattttaaaaatataatatatagtaataatattaaaattaattatatattatagttaataaatataatttgaaagatacaaatttatttaaatatttttgaaaatattatattaacataatattatgttcattgtatttaattttagtcaatatatatatatatatatacatatatgtttaatttctttaattatattattccattgtttgtggacataatgatttaaaaaaataattttcagtatataattaaatttagtgatatatacattatatttttaatatgattatttgaaatatataatacaaattattaaacatatatgcatatcataattaaacatatttatttaaataaattaattaatttacaaattatttgacaataaatataattatggtgttatgattatgtatatatttatatttaagtaggttagtaacatgtgttttgtatagaaactagttttataatttataaattttgcatatggtataagtttttaatgtattaatttattttatttgaagtgaaaaaaaaatatatatatatatatatatatatattgacacacaatagttaataaaacattttgcttgaaaaaaatggcaatgttgttagattaggatattaaattttttaattaacctatgaatagttaattatggttgtttattacatttttttaatgaacataggctagacatattgaaatactttattaaaaataatggaaaattttgcaatatagaataatggatcatgatcaagatgttccagcactgccaacgactgagtctccattgagcgtcattgactccggtccatccatacggactctgttgacgttacaggagaaacatatatcgacgaatgtgtggaattcgcagggtgatttgaccgcacgggatcgtatacttaatgtgaggcatactgcgacacacgatcatcaggctatacctgaggagatccacctgtggcttagacaagcgggtttttaccacgctgcgcaatcatgaggtaagcatattctatattgtacgttgcttgtattatggtgttatgattgtattgtaatgtatatgtaattgtggtataatgcattatttcagatcgaccaccaccttgtctcaacgcttgttgagcgatggcgtccagagacacgtacattccatatgaccatgggtgaggtcaccatcaccctggaggatgtacatcatctattggggctgtcgactaatggtgaggttgtttcaggccgccatggccgccacaactttcgtgacattgttggtgaccttttaggagttgagccagctgccggttgagatttacatggcagtttgttggggctccactatttacgagagcaattcgatgtttatgcggtccacgctggcacagaagttggacgaatgagatacacccatgcattgatattgcgtatcttaggcgggatgttgtttgtgaacactgcctctagctttgtgccagctcgacacctgttatatttggacgatttcgagcgcacaagtttgtttagttgggaatttgcagttcttgcagccctgtataggaagttgtgcaagacgacaagtgcatcacgttgtgagatgggtggatgtgcattgttgttgcaattgtgggcttggatgagattcccgactatctctcctaaccttcccgagtggaagatcaagatgtgattgagcgcgagatatataaaaacaggtattgcaattgtgggtttgccattgttgggagtatatgttgttgttaatattttcttgttgtaggtttaatgtgtatgacatgcgccaaaccagatatacacattcacagatatcggcattacattaatgtcatgcgtaggagagatattcgttggaggtcgtacgaccttgttgatctagttcatccaccacgggttgacatggctaggcgatggttggatgtttgtcccctaattggttacgagattgtggcctaccagcagccagatcgagttctacgccagtttgggtttgaccagcctatcccagaggatcctattaattatagtgacctgctgaccataagtattaccgagaagacagacatggattggaggcagcgacatggtttctttattgtccaatgcgcagacagagatgcccttatgttgcaggatcttactcctttgcgaagagatcaacatttaatagtctcagtgcgatcagtctgtacatgaaataaaattaatcaacaccaacattaagttatgttaaaaactgacaaatataattaatatgcgcaccatgtgtgcattgagatgagtatttatctgtcaacaatgagtacatgcagttgtactacactgtgacacgtcgctggatgacccgtagagttgcgttcaatgcacatgtggtgcgcatattaattatatttgtcaatttttaacttaatttaatgttggtgttgattaattttatttcatgtacaaactgatcgcgctgagactattgtccacatgacaacaccagaggtgcaggggacatttgacatgaggcggttcagcttctggctgcatgtgatgatttggatagagtgatagatcctggagatcttgcacttccacctgtatggcgtcagaccgaggcccctcctacagtggttcgtagtaaccgacgtgcgcattatgaggggttaccccaccaccactctaccccccagttgctgacacacttgttttcctcttcctccccgtcataccgacatgttctacacacccgactaccctttggggccatcctagcagtacttttggtcgtcgcagtatcaagccggatcgtctagtagtggacaggacgcgtttccaccatcgcagtaccccccatggtttcctgtaccatcaatgtcgcagcttgggtttgcatatccatcctatctgatgtatgtagttaggcctagttcacaggcgacatcggaatttgcagagtgttataggtctgcttatccgacgccaaaaccaaatccagtaatggcaactctgatggcacaattggcacatttcatgcactccacaccctccagcagtttcggtgatcattcaacagacttcttagcgacggcaatgcagaggggagatggtgccagtgacgatcatggtgatgatgaccctgaccgcttgattaggagaaatccagttcgtggagcgcagtatctgttagatacagagggagttggaagaaggagatgcaagtttatcaaggcaaggctgaagtatttggcttgaagtcttagcttttgacatgtccaattattttgatggcatttgtaatttgtctaagaggttcaaacacattggctagtgatccttgcattgcataattcattacatgcattcatatataatatataggattaaatgtttgcatttgcaaagaaaatcacatggcttatgttttttggaaaaatctgtttttgcattgtgttaattgattaacagtactatgtaattgattacatatgtgtgtctatttctgaaaaagccatgatgaacactttaatcgattaccactcttctgtaatctattaccaagtgttattttcaaaatatgtctatctgctttaatcgattacaggcaaatcgtaatcaattactaagtgcattttacatataataagtgtatgctttaatcgattacaagaaagcgtaatcgattacaaaggtttgtttctatctgagcttttctgatttaatcgattaccaatttcagtaatcgatcagcttgtttctaaaatcaattatctgtgttaatcgattacatcacgtattaattgattaagttgttcttgaaagttttccagaaagctcaagaacattttaatcaattatctgtttaaattaattgattacatatgttaacataatcgattaccttaacaggttaatcgattatagtttgttaaatcagttttctatttaaagactttttgggtctgcacttacaacattcagaacaatatcaaagaacgaaagatactttgagagagagacttaccaaaagctttaagtgcattcaaaagttcaagaaactaattttacttagagagacacatcttgtgagaagatcaaagagttatgtctttggaaataatgtatttgtgaagaaaaagatatttcaaggaagattagtctgtgcattgactttcatacatcctgattggttggtaacaacatatattcattcatcatctgttaaggatcttaggttgtgtacttcttgaactctttcttttagaatttctgttttagatttctgtgttgtaaatcattttagttctttcaagctttcttgagtagggttctcaagaggtaaagatctgagtagggttcttagagtctttgtgatttgtattctaatagtgttttagaattcagtatctttatctagggttgatagagattatcacttgttttgcttgtaaaagaataatttgatttagtgaaaactctaacctagtgttggttgtaagatattggatgtagcctccaagtttgtgaggtgaactagtataaattattgtgtattgtgttctttatctgtgtttcttttattgctagtatttggaaatcaatatacaatcaacaagaagcatttcagtcattagatgcatattgaaataaaattctgtttttgataaagggtgattgagtgatacgatccaagttttaattccgcaaattgttttaaagaaaagttttaaaagactgttttaaccaattcaccccctcttggttatttgaagtatgtttattgtattttcaatgggtatcaagagttggttcttgagatttattcaagattgtaaaatataggaacacttcacacttaaccaaggggggtgaattggttaggcttggtaaatttaaaaaatttattgatcaaaatcagagtttttccctttgtggatctttatcacattagaaaccaagaacttttatccaaagatgaacccaaaagatgtaatgcttcaagaaccaagatgtaaatcagaattcacaaagaagataatcaaatatgcagaaaaataaagaacacacaacaattatactggttcacttcaaacactatgaagctacatccagttttcttctactcaacactagagtagagttccactattgtaaattttagttcttacaagattattacaagtctctctttatcaatcctagataaagttcagagatctaaaaccctattagatccttagagaccaaatccagctgagaacactacccagcaacacttagagaaacactatctctaaaacacaagcaagaaccccactttcaatagaaaatcaaatacaagattcaactgagaattacaaacacaaagagtaaggaaagaaagcacctgatgatccaaaagataatatgcataagaatgaatataacaggttgaatgcaagcactacattcagaacaagccttttctgaaactttgacaagaaaatcttgcttcactcaatcataaagacccatattggttttgatggaagcaagaacttaagtacccagaaaaatcactttgtgaaagcttagaatgcctttagaatgcttagaatttgaaaaactcaagttgtgaaataagttgagcaaggattcaatttatagaaagatttgtaaccgcctgtaatcgattaaatgcgctcctgtaatcgattattttgcatatgtaatcgattacacacgctcctgtaatcgattaaagtgttcataaacattttgggcagcattaacgagcaatttaatcgattatcccgacgtgtaatcgattactccaggcactatgtaaaatgagtttgtactaagtaatcgattacaataattgataatcgattataccaggcattctgtaaaacatgtttgtactatgtaatcgatttcaatgaatggtaatcgattaagacaggcatcatgcaaaacatgtattgaactaagtaatcgattacaataaatggtaatcgattataccagcgtggtgctatttttgaaaatgataagaatacttcaacacaaccaagagagggggtgaattggttgaaccttgttgaattaaaatttaaaatcagagtattaccacaggatcattatcactttcaatattgtttcaaaacaaagaatcaatattcaatcaaattccttttccaagaagaatagaaaatagagtataactttctgtgcaatgaaattaattcacaaacaaagcaattaaaagatgaataggtgagaagaaagattagtcatagatttttatactggttcacctcaaaccctatgaggctatatccaattcttctactcaacactagagtagagttccactattgtaaaaatatccttacaagcaaatttacaagcctctcttcatcagccctagatgaagttcagagatccaaaacctattagatccttagagaccaaaacccacactgagaacactactcagctgtcttttagaaaaacactatctcacacttgcaagaaacttaattacaatagactaatctttacacaattcaaagaacagattacaccatcaaagaataagaaaagatatcacctgataatccaagaatgaatgcacaatgaatgattctcaggttaaatgatagattacaaacacatatgcagtcctttccttatgctttgaataaatgaggcttcaccttcttgaatcaaaaacccatatgaattttgtgaagctaagtgtgtttagaactcaaagaaactcactaatgaaagctcagaacgtttgtgaaagaccagaatacgtattatcaaaagttacaaacttcagagaagtgggttctatttataacaaatttctaactgaaaataatcgattacacacgctcctgtaatcaattatttaccatttgttatcgattaaatcaagactgtaatcgattaaaatgctcctaatagtttctgggtttaggctatgaacaatataatcgattattcggtgaagtaatcgattaaaccagtcaaacatgtattctaaatgagcttagtaatcgattaatacgatatgtaatcgattaagacagtgagctgtgattcttctattatgcatgtgatcctttgtaatcgattatcacgatgtgtaatcgattaagacagagcgattgtgatttttctaagtctatatgcataggcttgtaatcgattaccaactctatgtaatcgattaagacagagagttccattttacataaaaagccttagtaatcgtttaaaccgatatgtaatcgattacaatgatcatactttgtttttctaaagggtactaagaacaaaataatcgatgtcactattcttgtaatcgattattaattatgtaactttatttttccaaaaactttacttcctaagtgcctttctaattaattgcttttacttaatcaattaattcaatgatcctaaatgaatgatgtgcacacttggattatcagatcatatacttccttttacaatttatcaaattgattcttcaagctttcctttgaacatttcctttgagcatgtttaaaagtccaaaaccttgaagcttgatcttcattccttgatgcttggcttcacttgaatcaacaatctccccctttttggctttaaacatgccaaatcttccatttgattaagcaaaggtacttggagatcaatttgaaaaagctattgtttgaacaagcattataaacctgaaaactttcaaacaatcttgcaaaaaacaagtgttaaagcacatgttgttcatgaagcattcaattaagcattatactattgtattaggttcaattttaaacataaactccccctaaattctagcattcattcagatcaatttctgggcaaaaaattgaatcaaaaaacagggatgaacagagtacattttaaactactccccctatttggtttgttaaaagccaaaaaataatgtgagcacaacggatttaaactggaattgcataattgcattaataggatagcatatagggtagtacttaaagcaaattgtaaaatatagcatagcataatattgttcattacaaccagaatttaaactgaataaaaactgagaaaagaaaacataaactaagaatcctagaattctacatatgctctatcatccatgttggtttcaatagcctctagcctctccctaatgtcttctaaggcttcatgtgtttcagccttgaattcttcttgcaggttcaaaagagaatccatcttttgaatcataagagattcaaaatctgagaaagcttgctggggtggctgtggttgttcttgttgtccttcatcctcaaaattgttaaaaaataaggaacactcacaattaaccaagagggggggggttgaattggttaaccttgggtaattaaaaaaaactttctttcaatatcagagtttaaaatcagagttagaatgcccttaggatctttaaaacaaacccagaatgattatccttatccaagatcaatccaagactttgtaatgcaaccaaattaagtacacaacacagaattcacacaaggataaacacacaacacagaattcatacaagacttgataaaaactgcagaatataaatcaggagacaatatttatactggttcacctcaaaacctatgaggctacatccagtttcttctactcaacactagagtagagttccactattgcatttctgtttcttacaaacaattacatgcttctcttcttcaaccctagaagaagttcagagatctaaaacactattagatccttagaagccaaacccacactgagaaacctactcagttgtctttggagaaaccctatctccctaggagaaacactatcccctcttgcaagaaaacccaaatacaatagaaacacaacttacaaagttactgtagaaaactttacattcacaaagcttaaggaaagaattcacctgatgatccaagataaagaatatgaatgaaaaacctcaggttgaatgcagacttatgatgcagaaagctttcctaagcatttgtgactcaacaagcttgcttcactatcattcttaatagcctatcaatggagtaatggaagcaagacactataaacccagaagaagacttagtgacgccttagaatgctcagaatatcgaaaagttttcgttcaatcttaatctctgttctttttttaatcactagagccaagggttctatttatagttaaaaacgtaacagttttaatcgattaaatccgctccttgacgctcctgtaatcgattaaatcgacttttgattttccaaaatttacaacaaacgggtagaataatcgattaacccgtagtgtaatcgattacatcagtctgagcattatttcatgtttaggtaaaataatcgattacaagttatggtaatcgattaagccagtcaaggcatcatctgggtgttcttaaataatcgattacagctattcgtaatcgactaagttagaatgtatgcaaaacctgttttgaactatataatcgattacatgaagtggtaatcgattaaaccagtcagagaataaaatctcaagtatgctaatgtcttaaataatcgattaataagatagtctaatcgattaaaatgttcatgtttgattttccagaaaacttatgaacaaaataatcgattcctttaactcagtaatcgattaaaccagtactagactatttttccaaaaatacttagctttttcttcagtatcaaattaatcacataaaatctaaatgatgcaatgcttgtatgatgaatgaatgatatgcaatcaatacttggatcatcataatgctttcttttccttttacattttaatcacaagcttcagtcctcattcttgagtcatgttgaaagccaaaacttccaactcttggtcattgcttgattcttcaagttgctccccctcaattcaacaatctccccctttttggctttaaacatgccaaatctccaattgaaaagcaatgggtctttgtgattgaatggaaaagcttctcatgttcctgtacttttctttatacctgaaatttcaataattctttccaagaacaagtgttaaacgtatctgagctttactcatcatgtatttctaacatatatgtatcattagcaatcagttttagtccttaactcccccttaatttcacaagatatgcaactgaaatttttgataaaaaatagcacaaaaaacaggggtgaacagagtatgatgcagagcacttgcattttcattttgattttcaatttttctccccctatttggctttttaaagtcaaaaaatgaaatcacagtagataagtgatgaacagaaagcatatattccatttatagagacagaagagtacattaagatgctttactaaaagatagagaaacagagtatagaactgaaactgaaattataaaaactaagtttaagacataaaatactaaggtctaaaattctacagactcttcatccattctaagagtagactcaatatcatctaatctatcattaatctctctgaaggatccttgaacttcagctttgaagtcatgatgcatctgtagaagaccatccatttttgccagcatcaatgcttcaaattgggtatgaagaggttgcttagattgatcaccagtacttgctgagcctgccacatcttcactatcaaccacaacattttcttgctgctgctgaggctcttgctgtggtgcctgtcctcccattacccagccatctagagttttatgcagaccgagtttggacagatgtttctcttgaatcagactatttgaagaattagtgttatccatcacctcattggatacatctattccaaagtgatcaatgaatcgtgatacaagaacaagataaggaaagggacaatttacaagcctcttagacttcatcataatttcttgaaatataagaacccagttcattgggatagagttgagaagaccatacattagttgcaagtcctcatcagtagcttgagcatgattggttgcccttggagtaagaatatatgtaatgagataatgaagaagtctattttcaggagacatagggccagtgctcaacctgtttctaattggttggttgggatcactaagggtttctctgtaggtacccatttttgtatagccctctgggttttctacaaattttctctccccctcattgactatgcctgccacaatctcccaaatctcaggggtaatcagcatatcaacacctttcacagtagttttgaaatagccttgcatagaggcttttccacatgtgtaaaagacttttactagatcaggataataagtacccttcatttccatgaatcttctaagaccttgagtttctaacaagacaggaaacacaaacccttcttgaataaaccaatctaacttgatatattttggagcacaaatgggtttggttgcattaaactgaagataattcattttatctgattcttttgtgagccaaacactaagcctgtctggtggaggttgagattggggattgatggatgattcacccacttttcttttacccgttctaatcctttttggtgcagacatcttaaactaggcacaaaaaggaatgatagcagagaagaaagatatagagaacaaggaaggtgatattagggcaaaaaaacttaagagaatgacacaaaaaaaattcaagagggaattggtgcagagcagaataaggtacttatgtactatttatagaccaaggttgagaataaaaacactttgaaatttgaaaaatatagctgtttgaagtagttaatgcaggttagtggctgtttaagggttaaaaaaaaaaaaaaaaacgcgttgattggacagttacaattttcaaaaatatgtcagaatactcgtaacaactcaaacaatcgattatatctctatgtaatcgattaatccagaaacattttaaaatattgactgcgtagcacagatggccagaggtagaagacaatttgtaatcgattaatcttccaagataatcgattatttggtcatggataagaattcaacctaagaactttttaatcgattaacacttgttgtaatcgatttttccagagtatcctatttttcctatccagagttaatagcattataatcgattgtcccgataggtaatcgattatcccagttccccttaacttttcaaggttgatatttgaagcttgtaatcgattgtgattcacatgtaatctattatatgaccttgattttggaacagagatttgattttaatgaatataatcgattattccgatgctttaatcgattattcaattacgaataacagaaaacagagctttctaatatgttgaacagctttttgattctaatgtacagagcatgataagcatgatatcagagcattatgatattgttacagctttcatagtgattcagcagtaaagatgacagtaaatcaaatcataaacatgctaacatatgttgtgttcatcaagaattcctagcatgtttctaagagtaaaaaatctatcatatttgagaagtaaaattcatgtcacaacataaatttctaattgaggatctagtagaaactccctttgatacttcaccaatgatgttgtctagtgaaagatctctagtagttttccattcctttggcaattgatttgatgttgatgagcttccttcagcactaggttcattcttctcattaatagacatcttttccaattgaatattctgttcttcattttctttcctcttgcctattcttacaatttctaaattcgttcttaaatcgacagaattttcatttgaaccttaatttctaaattcgtttttaaaatcaataaaaattcgttggaacttttatcctttctgttttcgaaaattttttagcaaataaaaaaaaaataaatacgtaataaaaagcgaagtagaagcggtcgtttcaattgtggtatcagagctgtgttatgttttctgaggattgtatgcttgcatgtgatgtttgtggatatttgtgcacgtgacgtctgtgtttctaagtatttattatgtgtatgtgatgttttataggatgtttttataagtgatgatttttgtatgttgtgtgtttttaagtgtttgttgtattttatgtgtttgttgtatatgttttataggttgatcatgaactgggttttctatacttttgaagaattagaaaattagactagtttaattttcttggaataacgtaattgaagctggttggataagatttgaggttaatatttaggttgaactttatggttattttatggtgaaactaagatgattttaaaataacaagatgatttatgaaatagagtattagtaaggatcgaactctaagggataattgatagctttgatgatcattagaagttttgtcatctttatggactttttgaatttatcggaaaagaaagaaagaaataatggtttaagtatctgaattttgaggatttagtagtaaggcggtaagtgatggaaaaattaaaaggtattagaattgaaattttaaaggcataaagaaattagaattatgtggaaaattgcggattactagattcttgatatgattctctgttacctggggatggcattaagtggttttgatgatatttggagattttgtcataatttatggattagttaaacttatcaataaaggataaatggataaagggttaagtagtagagtaatttaatttgaggatctagtggtaggatggtaggtgaaaagagaattgggaaatcacttaggattgaaatttttgggaaggtttaaagagtatggattattagtcgtgctactaacatggtttcctgtgctgaaggttattttatgatcaagttggacataagtacgcttggttgaggtatggtgatttaaatcttatttatagtataaagaatgttaagagtaaaatgtgttttcacaaaataataggtatgatatttatgatttatggatgaagctgtctgctataccataagtttccatgcatattcatgagttagcagattggccacctggataacttgtgaattgcaaagaaacattatggcaagtagtcaaggaaaaacaagtgactgctagaattttaggtaacgacctttatagtaactaagtacgaaatgggattatgaggaaagtctgagtttcttaattggtggaaacgaggaataataattaagaatggttgcattagagatgatattttaagttggaggataacgactattggtgatttaggaaaattcttagaatactctggaaaagctattttcttgaagaaatcaggaatagggagtgaaagaatttttaaagattatacttagggtagaatagatgactaagtttaaaacattacggagaaaattttcaaagaaaatatggtatgaggagtttagtatgatttcgagttttagtgaattcaatttttgggatatcttctgtaaatgaaaactttgatgatttaagcaagtgtgatatatgttgtgttgatatagattgctcgacctattaacataattacctcttgataatttattttcgataataaggtattgagttattttaaggatagaaataaagggatgattatctttgtggattgatcttggttatctttaaaaggaagaaaatataagattttgattaccctaagaagtgaagatttaggtttccttaattgatcttccttaatacgaatttccatgaacatttcttgggaatataaacaggttactatttaagagaaatagagttttataaagagttagatatatgaggatgaaattatatctaaaagatttcttaaagaggttgtagaattggttttgagatttaatatgattccttaggaaatattagtaaagatggaaaagaacctggaagcttaggaaaataaattttaagatctttagagaattggaagatattctaaaaagttatctttagaatcagctgggatatttagttatgccttgagaactctcaccctttcgcaaaagatgtgaaaatatttagatatgatattttagaataatccaaggcttaagaacagaatgagaaatacttgagggggttgttacggattttaaggatagaacactttatattaagataattaagtttaagttagaattaagattcttagagcatgtaatgtctcaatataattgtatatctttaaaggatggttttaaagtattaaagtgcagaatattatgaaatcgtcaagaagtaagatcaagatgaattgttgaggaaaaattttgtagagaatggatatctagcatagatcttgatgttaactcttggggacaaaaccttttgataagtaggttgtgatagatctgttaagacaaatagaagatcttaaggagtgaagttgaaaccctatggattctcaaggaaaataagtcatgaaattttagtgtgatacttgatgaaattctagatttttaagttcacatcgacctctagaaattaagttgaaactaggcatccaacaaactggaaattgagatgtcaaataggctatcctatatctccaagagattaacaaattttgaggacgaaattttttgaaggaggggagaattgtaacaccccaaaatttcagtccatttctagggtaaaatattaattggaggtagtacagaaaaatttaggaaaatgccggaaatgcccctggacattttgggaatgactaaaatacccctagacatcttagcagggtatcttaaggagaaaattctataagtactctaggatgtttgaaaaatgatcagaatacccttagggtgacaattacagagtttccctgaacatttgtggaaatgacgaatttacccctaggatgagaggtaaaattaccaaaatacccttcaggtcaaacactgaccaaatgattttagaaatttgtgggaacctcattattggataaaatgcttttagacaacatattattaacatgattgaggtcagaaaaccctaaacaataatttctaggcattttggaagataatctgaaaagagctcaatttagacaacctcaggtatcaaaaaattataataaaagggtaaatataatctatggagttttctcttaattatgggagaaataagttgtctaaataagttagtttagtgattttaataattaaaatcaaataaggatcaataagaaaacagaatattgccattctatgtaaataaaggcaaattttgtacatttggccctagaaataagtcttgaccgtggatataagaaagaaaagcgaatagaatgcttctatatgaagagtgcacgtgaagataagtcaaggaggcaaggagtggtaaaatttcaaaccattagccaataaaaatcaagtagtaaaagctatgttgactaaaggaagactttgggaaaacaacaagctaattctcatacaacaagtcatgagtgctcttcaagaaataaaaggtaacgtacaagaatagaagagtaaagaatttggccacttgaagggttgaaaagtcaagcttaactttcattggttcatgaaaaaggcttaacagcttgtaagatgcaaaagtgtagtaaacttcactccttggaacacgtagccatttttaagcattatttcaaagatcccaacggtcaaaatctatatatttaagttaggaatatgcctttaaaattacatgaagatccaacggtgaaccaattcagagtaagtattttattaatacgggtttttgggcaaaaagcaaaaattatttggcataaactaagcaagcattatttggcaaccaagaagcttgctacggtggaaaggaaggaaaaaaatctgaatagcctttgaataatggaatatcaagtggaatggccaaggaataaagtcaagcatggtgcatatttttttagaccaaaggaatctacattgaatgcaaggaagcaaaaatcaaattgaattcctccaagccattgagtaaccgtgcaacaattgttgaccaagggcttcaaactatcaaccaataagaccatgctatataaggacatgaatgaagtaaaattgggtcacccaccaaatagagaaaccgtgcagctccttcccttgccttttgtttttgttttcttgaaaccaaattacaaggaccagccgtgcatctccaaatggtcccacttgcttgccttagttttatttaattcttgttgaatccaaataacaaagcaaaccatgcagctccttcactctccaaaaaaaatttaaggcaccaaaccgtgcactttcctaagccccactacttgccttttgtttttagcttttagggaattacaaagccctaaccgtgtacccatcttgagctatcatttgcaccaaaagaaatccttccaagctttgagcaagctcacgtggagtaggaaccaagggaggctagcttgttcaaattgaggaaataattaaggtatgggggagttttgctaaatagaatttaagtattagcttacctcaaattaatctctactttcaactaactaactacttgaattaagataaaattaagtaaaagtataagaggaagaaaagattaagagaatcaagtttaattaggtaggttattgggatgaatgaagcaaccataattaagctaagcacttaactttttattgtttaaaattatattgttttggatagttggttatgatagtttaatttctaatgttgtaggagtaaagtgtagtttaagaaaacttcaagactagtatgataaaccatttaacgttttatttggatggagaagaaaccctaattaaattaaatacttatcgtttattctactattgttttaaatgattaattgggatggtttaatctttaacattaagtggtggattagaatagtttcatctttaatatagtagaattagagttaagagaactttaaattaatatgtcctagtgaaagtcataaagaaactaaaattagttagggatataattgtggttgttgtaaaatctatagatgctgttaatttatttttgatgatgtttgaattgttatttgtaattctgtaaataaaattatatagttgctgtaaattaaagctggttaaataaatctgtatgattaatgaatctgtatgctgttattaaataaaattgtataaatctgtatgttgttgacgtggttaaaagctgtttgacgtacttaattaatgctgtatgcatgctgttgctgtatttaaattgttgtttgtgttgctatattcaaatgcttatggtggcatgatgactgagatttatggaaaggagcattaagtggtgtgatatattgtgtgattcatgatataggattgaagaaataaaagtttacaacttgattaatgagtacaaataatgatgttgtagtgaacaatgaagacataacgtgttgatgtgattaaaagaatgcatatgtgatgaatgatgagaaaataagataaaaagagtatccatacatgattcaaggtgatttgatttgagaagtatatcatgtgatgatctgggatgttgagatgagatgggaatgaggatggttaacagtatatatttggtgtgttaaaaaccattatctgtgatgatatgatgataaaactgtacccttgtgatgttgtgatgagtctgggatgaaggccctgtgaaaatgactctgtgatgttaagggatgatgaaaatgaaataataaagagataaaatgaaccagttatgcatttcatacgcatatacccagtggggtatgagatgatgatgatgagatgttaaatctcataaagaggagtgtcagataactaaactgagtccatataactagggggtagacgcagtgaggaccacaccaccatgatgatcacatggatgggagtgataatcctacgcgccactgagctaccctgaccggatggataagttcgttccactaaggtgagggtggggttatctgacagtggccacaattatttagacgttgctgagatctcagtcatgcatcatacaataagatgagcatgcattacatgacaattctgtgtaaaaatgacttatttatattttataattgtttacgtatatttgatctgtcgatgtttaaatttgatttatcatttggtctgttgatatttaaattttgtttatcaagactaacccctatttgtgtcggtggttgacacctgtgatgaccccaaattatttgggcgagcagaaaagcagtgatatggatgttgtacgagaagacaggatgaagaatatgtgctgtttgtctacttttgatgatctatgcttgtgctgtattatggactgtttatatatgggactctggatatgtaataatgaatggaatatttggtatgaatgagcgtttggactatatgatttaaataacgcgtaaaactcttacaatttctaaattcgttcttaaatcgacagaattttcatttgaaccttaatttctaaatttgtttttaaaatcaataaaaattcgttggaacttttatcctttctgttttcaaaatttttttagcaaataataaaaaaaaaatacgtaataaaaagcgaagtagaagcggtcgtttcattaaacccccctttacacgtttaatccctaatgcagacaattggtccttgagagacgacctaggagtcacttcctagtactacatttaaactgtattaatttggccgagtgcgacctcaatcaaattttggcgccgttgccggggatcatcagttctgcaattagggttctggtgtgtgtgtgtgttttctattttgttttgtgttgttctattttctgttctgttattattgttcattgttgcaattggtagaggaagtaaggtagcattcaagttaagctgaaaatttcactcagataaccaatggaacagtaacctgaattgtgcttgcttcctataccagtcctgttttaagggtgtgcttgctataatttgtgcttcgagccttttgtttcttgcatatttggttgtgttgatcaattctgcaggtccaattaggggactcagcaagcaattcgtggagactagaggaactgcatgcaggaacagccgcatgaacagtaatgaacagtaaccagtttttctgaattatttgtgatttttggttttgataggtagacttgttatttttgcttgaaattttgtgcggtaacttcttttagcttatatttgtgtggaaaaataccaaaagcacctaaagtattccagattctgaaggtcaaaaattttggattccaatttttgtgaaaacttcgaattgtcataacttttgatccaaccatcagaattggacatattatatatgcttttggggtagaaaaaaaatatctagccaacccaggatgttatgctgcctggccaccgttggattttcaaaaaaagcctattttctattttatttttatttttgaagttttattttcctatttttctaaactttcttaatttggtttatatagttatcctttgaattaggttttgaaatttggtgtgctgtcttttcatgattttagggtgttgctcacaaaatttcagctcatttggacttcatttgagtatagctctagttttacctctctttatgcttgtctgataaatgcttgatatgttgcatatagtgcatgactagaggcaatccaggagacttacaaccctttgatcctgagatagataggacctaccatagattctgtgccattagatagtgttagtttgaattctgagcattctgcctctaactttaaaattttgtgcataccatttctgattctgctgatcataataatactgagaacaatatggcccaacctccacctcgtgagaggactcttagggagctggctgcacctgattttacctatgaaagcttgtgcattcagtatcctgatgaggatgtcccatatgttctcaagactggactaatacatttgctgcctaagtttcatggtcatgcaggagaatgtccacataagcatctgaaagaattccatatagtctgttccacaatgaaacctccagatgtccctgaagatcacattttcttaaaggcatttccacattcattggaggaagtggcaaaggattggttgtattaccttgctcccagatccatcactggttgggatgaccttaagagaatgtttctggagagatttttccctgcatctaggaccacaaccatcagaaaggatatttctggtatcaggcagcttggtggagaaagtttgtatgagtactgggagagatttaaaaagttgtgtgcaagctgtccacaccatcagatttctgagcaactccttctccagtatttttatgaaggccttaacagcatggagaggagtatgattgatgctgtcagtggtggagcacttggtgatatgacccctgcagaagctaggcacttgatagaaaagatggcttctaactcccagcagttcagtgcaaggaatgatgccattgttattcgtggagttcatgatgtagctgctaattcttcttcatctacagcaacgaatttagagggcaaactaggtgctttggttaatctagtgacttaacttgctgttaaccaaaagtctgcctctgttgccagagtttgtggtgtctgcacttccaatgatcattatactgatgcatgtccctctctgcagcaacatgttagctctgatgctcctcaagcttattctgcaaacatctacaacaataggcctcaacaacagcagccgaattatgatctgtccaataacaaatataatccagggtggagaaatcatcctaatctcagatggtcaaacacccaatagcagcaacagcaacagcatcagcagcagcctccattaccaccatttcaaggttctgctggtctaaccagaccatatgtacctccaccagtccagcagcagtaccagaggcaacaacaggatgaacctgcactaccagcccctcaaccttctacttctgaaccttcattggaggagctagtgagacagatgactcttcaaaatttgcaattccagcaagagaccagagcttccatccagagtctgactaaccagatggggcaaatggctactcaacttaatcaggcacagtcacaaaattcagataaacttccttctcaggctgtgcagaatccgaaaaatatgagtgccatcacattgaggtcagggaaacagattgacatacctactgtagtgccctcacctccatctataccagttcctacaccaacccctgcatctgtactaatacatgagcaaaatgacgatccaattggtactcgaaaaattcatgcaggcggaccttcttctagcatcagttctgatgagcagcaatcttccatccctcttccatttcctcctagatcgattccaagcaaaaagatggaagaggtggataaggaaatattggagatcttcaagaaagtagaggtcaacatacctctgctcgatgccatcaagcacatcccgaaatatgcaaaattcttgaaggatttgtgcactaataagaggaagaggaagatgacgggaattgagagactcagcatgggcagaaatgtgtcttctatgacaggtgaatctgttccaaacatgcctgaaaaatgtgaggatccaggtactttctgcataccctgtgttattggtaataataaatttgacaaagccatgtttgatttaggtgcttctataaatgtcatgcctctgtccatttttaaatctatgtctcttggtcctttgcaacctacgggtgtggtcatacagttggcaaatagaagtgttgcttaccctacaggtttcattgaggatgtcttagttagggtcgatgaactgatttttcctgctgatttctatgtgcttgatatggaggagggattctcccatggttctgttcccctcattttaggcaggccatttttgaaaacagcctgtactaagattgatgtgtatgctggtacattgtctatggagtttggtgatattgttgtccattttaacattcttgatcccatgaaacatccatctgaaaatcattctgttttccgtgctgagattcttaatgatgttgttgatgactatgtttctgatttctattcttcccatgatacaaaacaatgttttctatctgacctttacacttctcttgcatgcatggaatctgaatatgaatctgacaatgattctagctttgattttcaatctgaacatgtgtcccattttgatgcccgctctgagattaattctgatgtattgggtgatgtacctctggataataactttttagagtcagaatgcactaaccatgtttcaggaagtacacaagaatctgacttgcaggttgaggtacaagctgtggaacccattcttcttccatccctgattccttcctctgatcagcctactcccattccagaattaaaacccttaccgaaaaacctcaagtatgcctacttggatagtgatgagaggttgccagtgatcatttccacttcccttgatgctgttcaagaggacaagctgttgcatgttctgaaaaagcataagaaagccatcagatggaccctggcagatatatctggtattagcccatccacttgcatgcatagaatatcattggaggatggagctaaacccgtgagacagccacagaggagactcaacccggtaattctggatgtagtgaagaaggaggtgaccaagcttcttcaggctgggatcatttatcctatctttgatagtcagtgggtgagtccagtccaggtggtcccaaagaagacaggcctcactgttgtaaagaatgacaaggatgagcttatcccaaccagagtgcaaaacagttggagagtctgcatcgattaccgaaggctgaaccaagcaacacggaaatatcattttccgctgccattcattgaccagatgcttgagcgtctggcaggtaagtctcattactgtttccttgatggtttttctggttattttcaaatccatattgctcccgaggatgaggagaaaaccacattcacctgtccctttggcatttttgcctataggaggatgccttttggcctgtgtaacgcccctggtaccttccagcggtgcatgcttagcatattctctgattttcttgaaaattgcatagaggtgtttatggacgattttactgtatatggatcttcttttgacatatgtttagatagtttggataaagtgcttaatagatgcattgaaactaaccttgttttgaatttcgagaaatgccatttcatggtagaacagggaatagttttagggcatgtcatttctagtaagggcatagaggtagatcctgcaaaagtatctgttatttcacatctgccttaccactcttgcgagcgagaggttctttctttccttggccatgcagggttctacaggcgctttatcagagatttcagcaagaaggcccttccactatccaatctgctgcaaaaagatgtagattttatttttgatgatagttgtaagaaggcgttcgatcaccttaaggaagcattgactactacccctatcctccaggcacctgactggacagttccgtttgaattgatgtgtgatgcatccaattatgcattgggagctatcctggcacagagagttgataagctgcttagggtgatatattatgcttccaggactttggatgctgcccaagcaaactacactaccaccgagaaagagcttcttgccattgtgtttgctcttgattgtgtttgctcttgataaatttagatcatatttgcttggttctcctgttattgtttatactgaccatgcagctctaaagtacctgttgaaaaagactgactcaaagcctagactgatcagatggatgctcttgctccaagaatttgatttggatatccgtgaccggagtggagctcagaatttggtagcagaccatcttagcagaattgaaggagctgagaataatgacgaggtgttgcccatccaggataattttcctgatgaaaaccttttaagtgtttcttctgtttctgtttctaaccccaccccctggtttgctaatattgtgaattatctagttacttctgtttttcctcccttagcatcacgagctcaaattgataaattaaagagtgatgctaagcattatatttgggatgacccctatttgtggaagttgtgcagtgaccaggtgattaggagatgtataccagatcatgagattaattcggtcttgcagttctgtcattcttccgcaccaggtggccatctcggtatacagaggacagctcgcaaggttcttgattgtggtttatactggcctaccatcttcagagatgcggcgaagacctctagcacttgtgagcagtgtcagagagcaggaggatcccttacatggagacaacagatgcctcagcaacccatgctattctgtgaggtgtttgatgtctggggcattgatttcatgggcccctttcctgtctcttttggtttttcatatattcttttagctgttgattatgtttcaaaatgggttgaagccagagctactaggactaatgactctcgggttgttgtagattttgttcgatctaacatattttgcaggtttggaatacctagagccattattagtgatcaaggaacccatttttgcaatagatccatgcaggctttgctcaagaaatacggggttgtgcatcgagtctctacaccataccatccccaaactaatgggcaagctgaaatttccaaccgagaaatcaagaggatcttagagaaagttgtccagcccaacagaaaggattggagtataagattggacgatgctctttgggctcataggactgcctacaaagcgcccataggaatgtctccttatcgagttgtctttggtaaggcatgtcatctgcatgttgagattgagcatcgagcctattgggctgtgaagacctgcaacttttccatggatcaagctagtgaagaaaggaagttgcaactaagtgaactagatgagatccgccttgaagcttatgagaactcaaagttctacaaggagaagaccaagaagttccatgatagcctgatagctaggaaggacttcgaagttggccagaaagttctcttgtacaattctaggctcggacttatgggtggtaagttacggtcaaagtggattggaccctttgttgttactaatgtttatccttatggtacagttgaaatccaaagtgagtccacaggcaagagcttcaagatcaatggacaccgtcttaaaccattcctcaacaatccttccttgctggatgcagttgtggaggagatatctctgcttgaccctgcctccctcccatgttccactacaccttagggagttttctttttctttctcctcctttatttttatctcacttgtccatatttgttgcattattctgattgctctgaacttttgttgtgccacattggggacaatgtgtaatttaagtgtggggggggggagagactgttttttttttgttttgtttttgctatttttttttgttttgtttttgttatcttgtgcatgttttgcatgtttctttttgatttctaggttttgaataggatatttggcactcacttcactcttagataagagttgcttcatactatatgggttggaatccatgtttttctctacttggaaagatgattatgaagtttgaaaggttgatttaactatgacagatataccctgtgtgaggatttgagccactatctgttctttcatgtgtgctatacctcttgattgcttgcacagttgccttgtcttgactctgtttgatatttcttggttctcatgcatgtttggatatgattaaggcacttttgttttgataagcctctggccaaataagcttaccctgaatttaattcctttgacaaccctgttgagcctaatttcctttctattgtttgaagctcattacaagccttaagtgaaaaacaattattaccttaaccttagggaactttcgagctttggaattattttgggaataagtgaggggggtgcatgcatatattgttttggatgatgtctctggcctattggtttactctgatgttcagcttattcttcatgtttctatgcatcgtgatatatcagtaccatatattcatgcaagtgttaaaaaaaaagaaaaaaagaaaaaaatatagaaatgaaaaaaataataggaataagtatctgaagaaaagttgttgtgtttgaagcaaaggaaaaggaatggtgttagaggctgattagagatttttgggtttgtttttgtgcttacttcttacttattccccattgctcctctagtccctctggtttgcagctacttatcccatattttatcctctcccatgtccttgaccacattacaaccctgaaaagaccttttgatccttatatgcatgtttattgggtgttgattatagaggctttacaagtttatctgttgcttgttttcatgagtgttttgagagtatacaattgcctaaacacttgagagatacagtgtaatacagtgcatctggtgaggttctgttgcttttaattcacctcttgagcggattgattgttttgctaagttttgaatgcttggataaatcccataaatgtgtagtttctctgactctttgtgtgttggaaattgtcaattcctttctcttttcccagttttcatttaggattgtgcggaactgtttattttatagtatgtcactttctttaaagtctttagaattgttccttgctctatttttggattttgcccaggagtgcaaaaggctaagtgtggggggttttgatgagtcactatttacctttattttctcatctttctgtactcattttaatccctaatttgtgtttaatcgtttatattccacactgtttctcatttaggatttaattggaccgataattcagattttaattaatttggattattttaagtttaattattccaatttttattttcagggcagattaataattaaatgggcttggaattaattcatggacttgaagatgggagtgccacgtcagcatcattttccacatcagcattttatttttgttttatattattttagtgatttttgggccaaaactgttaggaaaagcccattttcatttaggtcagacactattatttatagaatattgtgcccatgtagaaggaaaaaacaagaagaacaacattattcacgttcaattttcttttagggttttagtattttcgttttctgttgttttctctatttttagggtttttcatttctgttggtgattttcgttttcagaatacagtgcgtttcaatttcagtgttatttcatttctgtttcaagttctaatctcgttttcgttttctgatttcagtatttaggttttcattttcgtttctgtttaatttcgttttttgcatttgaatttcgtttctcttctagtttcgtttaatgttcagtttcgtttcaattcacgtttctgttgttaatttctaattaatggaaggctaaatcctagggttggaccctaagacagattgcaaaccctttaatggaggttctctgtaattgcaatttgttttctgcttggttcttccttgttgggtttctgttctgtattttttgaattagagtcatgcttaatgattatgatattgattgattcagtaatctcaggttgcttaatcctgagagcttgccctgaggaggttcacgtttgcttcattcgtgtaatgaagttttaggttaatcttcgcttagtagattaacctagactgataaggattaagtaggacagattatcttttgtgaaccaaggatattagaggcgcaatctattctaaggtctgacttgttttaaatccctgcaattaattagtatttctgttttaatttagaattccttgcattatgtcaaaaacccccctttacacgtttttgatccctaacgcagacaattgatccttgagagacgacctaggagtcacttcctagtactacatttaaactgtattaatttggccgagtacgacctcgatcactaatctttacacaattcaaagaacagattacaccatcaaagaataagaaaagatatcacctgataatccaagaatgaatgcacaatgaatgattctcaggttaaatgacagattacaaacacatatgcagtcctttccttatgctttgaatgaatgaggcttcaccttcttgaatcaaaaacccatatgaattttgtgaagctaagtgtgtttagaactcagagaaactcactaatgaaagctcggaacgtttgtgaaagcccagaatacgtattatcaaaagttacaaacttcagagaagtgggttctatttataacagatttctaactgaaaataatcgattaaacacgctcctgtaatcaattatttaccatttgtaatcgattaaatcaagactgtaatcgattaaaatgctcctaatagtttctgggtttaggctatgaacaatataatcgattattccgtgaagtaatcgattaaaccagtcagacatgtattctaaatgagcttagtaatcgattaatacgatatgtaatcgactaagacaatgagctgtgattcttctattatgcatgtgatcctttgtaatcgattaagacagagcgattgtgatttttctaagtctatatgcataggcttgtaatcgattacaatgatcatactttgtttttctaaagggcactaagaacaaaataatcaatgtcactattcttgtaatcaattattaattatgtaagtttatttttccaaaaactttacttcctaagtgcctttctaattaattgcttttacttaatcaattaatccaatgatcctaaatgaatgattgatgcatgatgtgcacacttggattatcagatcatatacttccttttacaatttatcaaattgattcttcaagctttcctttgaacatttcctttgagcatgtttaaaagtccaaaaccttgaagcttgatcttcattccttgatgcttggcttcacttgaatcaacaattttctggatgagtaatgtaatcgattacggcttagtagtaatcgattaaaaaggtcataaaggcaaattatttccattctaagttaaaataatagattaatctgatagtgtaatcgattaaactgttcttgataattttccagaaagcttcaagaacaaaataatcgattctttgcttgttttaatcgattaaatcagtgcaatgctatttttccaaaaacacttagcttatttcatgattcaaaacaattacttaatgcctttgttatttaaacctaaatgcttatgaatggtatgaatgcaatgacttggatcattagaaacttccttcctttcacatttaatcacaagcttttcttcaaatcttcaaacatgttgaaagcccaaaacatttccaagtcttcaatttctcttcatgcttcaagtaactccccctcaaatcaacaatctccccctttttggctttaaacatgccaaatttgaaattgaacaacattgggtcttgtgattaattgaaggaccttcataccatttttctgagctttcttaacacctgaaaaaattcaatttcctttgcaagaacaagtgttaaagacaactgtttttagcttagcattcattctcagcatttatttgtttattgcaaccaatttaagcccttaactccccctaatttttccagattatgcagttgaattttcagttcgaaaaatgcttaaaaaataggggcaaacagagtacaatgcagagcatgcttaaattcaattttttctccccctatttggttttttaaagacaaaaatgcaaggcacagcggattagtaatgaacagaaacataacattgcattaatacttgattaggaattacattataaggcttaaaatgaaaataaaaacagagtacactaaaacagaaataatgaaggccttaaaattctacagattcttcatccatcctaagagtggcctcattatcatccagcctttcagtaatctccctaaaagagccctgaacttctgctttaaagtcatgatgcatctgcagaagcccatccattttggccagcataagggattcgaattgagagtgaaggggctgttgagaggtgtctccctcactagcagaatcagccatttgttcttcactattaagcacaaatggttcttgtttttgaggcacttgaggaggcagtccactcatcatccagccatcaggagtcttgtgaagtccaagcttggacaagtgcttctcctgaatgaggctgttggaagaattggtgttgtccaccacttcattagagacatcaatcccaaaatgatcaatgaatctagatacaaggacaggatatggaaagggatagttgacaagcctcttagccttcatcattatttcctgaaaaatgagaacccaattcataggaatggagttagtgagaccatacattagttgtaggtcctcatctgtagcttgggcatgattggttgcccttagggttaaaatatatgtgataaggtaatggagaagtctgttttcttgtgccataggaccagtacttaatctattcctaatgggttggtttgggtcagtgagagactctctataggtgcctattttgttgtaaccccctggggattcctcaaacttcctttccccatcattgacaaccccagcaatagactcccataactcaggggtaatgaccatgtcaacccctttgacagttgatttgaaatgttggccatcaatagagcctcttccacaggtgtagaagactttaacaagatcagggtagtaagtacccttcatttccatgaatctcctaaggccttgggtttctaataaggttggaaagacaaagccttcttggatgaaccaatcaaggcttatatatttagcaatattttagcaatattttactattactttgttgaacccttcattttcgtagcatttcttaccgatacggaaaaatacttaccatggaatgttgttttaaacacctcctatgagatatcttctttctgccaattctcatcatcaggttagaacatataagtaacatatactacaaccagacatgaattcctattcactttaacaaaaatactgaggtgattaggctcaatataaagttaaagttcgtcagaattcaacaaacacaaacagtcacacacaaacaatcacacacaacaagttacacaaaaaagcatagtcagtccatttccctcaggacctaacaggataaaccgctctgataccaaaactataacgacctaatttctaagttgattttattactagtatttttacgtagaataaatttttttcaagaaacatgtattagtaaaaattctaagtcataaaatttacaaaatatgtaaagactaatacattagtcaatgtctctgttacaaaagtttatacaagtacaaaactcttttcaaaatccagcctagtacatagcttcttcaatatatcaacattactccaaagcctcaaggaacctgtccagggctgccatctaagaaaaacaggaaacaaatcttgtgagaaataaatttctcaataggcaaagctaaatctgaccttattagtaggttagtaaaatcattcaaataatcaaacacatccacaagaaatatgcaactatatgaatgcatgagatgaactatcccagggcaaattccctccacatatcgtactgtacgtggccacactaagtgtggacgctgctatagtcttacgcaaacatgcatgaattttgccatatctccttgcacctgggtactacatattgtactatatgtagcatcagattctgtttccccaaagcctcgtactggacttggatcatggaaacatgaatccacctatcttattcacatcaacatccataaaaaatcaaatccataagcaaaatacatattaccttatggaaaatattttcatcatatcatcatatgtatcataagtatggttacaccaccataccttatccaataagtttataagtatggttaaaccgccatatcttattcaagcaaaatcattaccaacttaggcatgaccaaagaatatcctcatagaaaattatgttagtaatctaactaataatccataatatgtcttttcaaataatttctaatcccttgaaattttcataataaaagattaaagcctagtatgcatcttttattctcttttcacccaccacctcattaattaatcctcaaatcaaatcatcaagtatttaaaccattcaactacataacattcatcctctacttcaaaaattaaatcaaaatcttttcataaaaatatcaacagacagcccaaaatatcatcaaaatcacctagaaaaatcatcaaatgggcttccatacatcactaatattgatgggtataaatcatcacctatcttatggcttaaatcaacatattctcatcaaagaataaccttcaaatagcacgaaattcaagcctaaataataaccataattcagcctactaaaacatgtaaattaatccaaaccattgattaactagagatttaagcttagcctacctcaagtgattttgagtcttgatatccttctaagcttgtcaaatccttcctaaggttgtttgcctctacacgtaatttcttcaaggtgaagggatttacttgatttaagctttaaagggaaagatgaaatgaaatgaaagtggtgtgagggagagagttcacgcggggtttgaagaaaggaatggtcttggaattggcttgtacttatgttcctcctcctccctttatatagtggtgaagaaatgattacttagagaaaaatctcataagccatcattattcctttacaagtgtccctacacttgttataatcttaaggcttccttcctttcttccttccaagtgtcctaccacttggcatgatcttagagcttcttctcatttgcttccaagtgtccaagctcttgaagtttctccatttctcttgcattttcgtggagtagcttgccaaggaagattgttatgctttttctttcattcttgagtttatcccaaacctgttttagtaaaattctaattctggattcgttaaccgttggatctctttaaaattttaaaggtacattactatctcacatatgtaactttttaccgttgggattgttgacataatgtatagagctgtccacgtgcaagatggaagagtgtagagaaatcttggcttgatttttatgttaccttgcatccatgccatacaagtgtcttccacttgttttcatcttatggcttatcttccaagtggctaaattcaagaagcttcttcctcattctccgtgcttctccacgtgaatgacaagctcaaagggaaggaatacaaatttttctccctttcatgctatatatggtcattttttatgatgaataaaaatctagtttcaatatggtattttcttaaaaagaaatccaatttaatttgaattcttttatttaaagaaaattttgaatattaaaattctagatgttcctaagaatttatcccagtgatagtttaaattaatcccaagcagtcttatacagggtaatacataaacctttcattctagactacatctttatcttgtttttgattggtctatacttcttctgaccgtcaaaattaataaatcattttaaataggtctattcatcctataattagaagaaaattctatagattttatgtaccatttttccatatttttctgattcttgagttttcttgaatacagcctcaaatttgtcatcttctaaaatttgtagaaattttattctagagttttgtgtcacaaaatgttgatacttagtcagctaagtgtattctataatttcatcaagtttctacaaaatttctaaagttatttgagcatttctggcctaggggcattttggtaattatgccattcaacctaggggtattttggtcatttttaaaaatgtccaagggcattttttgtaattttcatcttaagggttttctagtaatttctacttcatggaaagagtgatatagttatttttctctaaacatacttgtatccaattatcatcacatttttataattttggggatgttacaactaatgcttttcctatctagtttacatcctgcaaaatcagaatctgaataaccaataatatttatagatgcacctttaggataccaaagcccaactttgggtgttgtcttgagatatttaatgatccttttgactgttgtgagatgagactcttttggatttgcttggtatcttgcacacaagcaaacacttagcatgatgtctggtctattagctgtcaagtaaagtaatgatccaatcattcctctatacttggattcatccactttcttccctttttcatctttgtcaagataggttgaggtagccataggagttgcagcatctttgcttttctccatctcaaacttcttgatcacttcaaggcaatattttgattgattaagaaaagtttcattcttcaattgcttaacttgtaatcctaggaaaaatgttaactctcccatcatagacatctcaaattcattttgcatagctgcagaaaattctttacaaagtttttgattagttgaaccaaaaataatattatcagcataaatttgaaccaataagaaatcattgctttgccttttgataaacaaggttttatcaacattgccccttgtgaaagattgttcaagcataaatttgcttaacctttcataccattgtctaggagcgtgtttcaaaccataaagtgcctttttaagtttataaacatagtttggatgtttgaaatcagtaaatccaggaggttgttcaacatatatgtcctcctcaatgtttccattcaaaaatgcacttttaacatccatttgaaaaagtttgaaacccattatgcatgcatatgcaagtagtagcctaatagcttccaaccttgcaactagagcataagtttcctcatagtcaatgccttcctcttggttgtaacctttagcaaccaatctagttgtatttctgactataattctactttcatccagcttgtttctaaaaacccattttgtaccaataggcttaatggatggaggatataataaccctaagtcatcccgcgaacggcgcaagcatcagagcgggtttggcgctataataacccttgttgctgaaaagaggacaaattttggggttttgctgtgagccacgccaggagcgtgggagccacgccttgagcgtgggaagtgctccagaaagttgattttctttggagtgccacgctggtagcgtgggagccactccaggagcgtgggaagtgttccagaaagtggttttctctggaatcccacgctggtagcgtgggaggccacgctggtagcgtggaaggcacgtcagggcctataaaaaggcccaaaacacgaaaatctcaacatttctctcttctccttcttcctccagcgttccaacctccatggctgaggttcccaagcttccatgactatgttttgtgaccctaaaccctttcttaagccttgaatcctcctataaaccttgtgagagcgagaatccttcctctctatcccttaaaaccccagagaagttccttctcagagaaaggctgaagagaactcgagcttgaggcgaggaatggcggtgttcagctgcaccaaggctagggagagtagcccagaggccttcctcatcagttctgaggtaagaaactcgagtttctccgattgattttggatttgagggtttcctgtgaatagtgacccatctgtgatagggctagaattaactctgggtccagttgggagatgtgtttagaatgatgaaaggaggaaggattagctttcagtttgtgatttggtgactgttggttttggctctaggtgagggcatgtgtgacttggactgagtcacttgatatgagacatgccagagccttacagatgggcttgtcgtgcctgagaggaccatggtaacggtgtcctgtgatgtgaaccgtttaagccctgagaaacccagaggacttggatctttagagcttttgagctcactgttgttggcttgtgttgagtctggaatgactctgaggccatggatggatctgagatagaccactgagggtctatggaaaggcttgtagagtataagcctgatgaaccttaggtagatgacctgggtgttagaagggactaaggtttccttctctgaggcagcgaatgtctgcttgatgagcttatgcatgattatatgcttgaatggtctgtgatatgtgcttgtatgccttggtagggcttgacacagtgggtgtcagagtagcagaccatcagtggaggctagagctgtgaggcacgactagccaggtaagctcattgttctggggttttcccttattctggtttgccacccgtatgggtgatgtatgatatgtatatatgagtaaaaatatatatatgcatgtgttctgagcctgagaggctgatgaacggtgctttgagtgaatctcagaccgttctggatatttggaatatgtgatggcctagtgtgtgctgggctgtaatgatgaaccctaggatagacactgaaacagtgtgagggtaatgagacacctgatatggcaggtgcgaggccatgggcctttgagggaatatagatcatgagatggtctgtgatggaacctagaggatactggatgagtatcaggctagttgaggttccctagccagaggtagagtttaaggactccctggaatagttgagattccttgggaggtgccactgctctccacctaagtcctaaggacagatggaactgtgtggatgttcctccttaggaaaagatgttggaagtcctgagtgaatatcctcaggccagtgtatgtggaagtcctggatgtgattgccctgtaaaggaggttcttgcccaggcatgtgttgtgaaagtcttggagggtattcccaggccagatgatagacagatatgttgtatctctaagagagggcttcccgagggggactagagcctagggcctcttagatgagctatatttgtattctcaaagtcctaagttgagggatctcctcagacaatgtctgtattctcaaagtcctgagttgagagatctcctcaggcaatgtttgtacaattcagaggcggtgcctctcttgtgttgagaagtgtctaggggatgacacttatgataggtacctctgtgagatatctgtgagacaggctatgagagctaggatgagatactgatgccatggtgatggctttgatctctgatggatggatgtgagagccatgacgaggtggaatacctctgatgctgagagcatcctgttatggacccagatggctgggatgtgtggaaactaggatgatatcctaggttttgtatgtgtgagcaaggatgatatccttagctctatttatatgttttgtttatgtttggtgatgaaccagggttagggaggattccccagaaccctgagtttactgagacgtttgtctcaccctgtatggggtttgtggttttcaggtgcttcttgaggagaggagcgacctcagggcatgaggccctagtggacctgataggctggatgggaggctgcattagaagaccagagcagagcttcaagagttgaagctggtcttagcatctctgtgttattgtagggtgtgtgtacacccatttgtactgtacatatttgttgtatgaaagtatgtttcctcctgattatctctgtttagttttatgtatctgcctatatagttgtttatgttttatctggatcagcaggagcttgttttatgttctttgttttgtggtttttatattccatgcataatttaatcaagataaacgattctatcgcttccgcaccgcatgtatttaacgttgatagcgtgatatggatatcattgatgataacataccggagacgttcggggtgttacagaggactaggaacaagttcccaaactttatttcttttaaattgatttaattcttcatgcatggcatgcatccaatgttcatcattcaaggcatgattgatatcttttggttcaatttgagaaacaaaagccatgtcacaacataaatttctaagagaagatctagtagagactccctttgatacttcaccaatgatgttatctaatgagagatctcttgtggttctccactcttttggcctttgacttggagttgatggaccttcttcagcactaggttcattcttttcatttatagacatcttctcaagctaaatattttgttcaatttgacctgcatcttcatcacaagctttttcctcttttgaggagttagattcatcacaaatcacatggacagattcttctatgcacatggttcttttgttgaaaactctatatgccttgctttgtaatgaatatccaagaaaaatggcttcatcagcctttgcatcaaactttccaagtgattcctttccattattcaaaacaaagcatttacagctaaaggttcttaggtgagaaacattgggctttcttcctttaaacaactcataaggggtcttcttcaaaataggtcttatgagtaatctatttaaagtataacaaacagtgtttactgtatcagcccaaaaatatttaggtaaatttgtctcatttagaagtgtcctagcaccttcttcaagtgatctgtttttcctctccacaacaccattttgttggggtgttcttggagctgaaaaattgtgattgattctattttcctcacagaaattttcaaagtgctcattttggaattccccaccatgatcacttctaattgagacaattttgcatcctttttcattttgaataagtttggctagttttctaaaagaatggaaagcatcacttttggatttcaaaaacaaagtccaagtgaatctagagaaatcatctacaatgaccaatccatagtaattgccccctaaactcatggttcttgaaggaccaaataaatctatgttttagtggtctagaggtggaaacaatatttttactttgaaaagatgttttagtttgttttcccttttgacatgcatcacatagtttgtccttctcaaatttgagtttggtaggccaatgactaagtctcttttaatgagcttattcatatgatgcatattgatatgactagctctcctatgccacagccatgtttcatctattttactcatcaagcatgtgattttgtgaagtaatgcatggttaatagaaagtaagtaaacattacatttccttttgccaatgtaaattacctcttcactcttaccatcacaaattaaacagcaatcttgattgaaggaaattttatagcctttgtcacataattggctaatgctaagtaggttgtgcttcaatccttcaacatagagtacattgcttattttggtattcaagctatcaccaatgctaccttcaccaatgatttttcctttgttattatctccataagtgacatatcccccatctttgaaaataaggttcttgagcaaggacatatcacctgtcatgtgtcttgagcatccactatcaagataccataggcaggagcttgctctaagacatacctacaaaagaaacaaatcacttcaagggagaaggtacccatttgcttttgggtccaagtaggttagttgttttctttttcttttctacccaaatgcactccccatttgggacataaaaccttcttgcaaaacaatggtaagctgtatgacctctttccatacaatagtgacaagttacagctttataagatcttcttgagaacctcttttgattgaatcttccccctttctttttcctctgttttggaggtacaaattttgtctttggacctttttaaagctatttttatatcccagaccagaagtatcaccaaactatttttgggcactcaacatatcatctaaatcacattttcctttgttgagtctttccaagatgtcaatcaattcttggttctttgaaacaatcttcaaatatttttcttcttgattgattctatactcattaaaatttttttgaatcatttcatacttgtcactagatgtggaggaagaggtgcaaatacatccacttgatttgtagcttgaagtaagattttcattttctttcttcaagttacaaacttcagtttgcaaatccattattttagcaagatgttcctcaatattctttttaagcttgctatttgatttagccagctttttggcctctttgtgcatttcttgaaaagcaaaaatagcttgatcaagttcagatgttacctcttcatcttcatctagaagatcatcattttcttcattgacaattgaggtgaggcacatgttggcttcttctaattcagtagaggattcagaggtagatgattcattgtcctcccaagcaagtaaaattgttaagactctttttattgttgctagagttgttgttggtggaattgttcatgttatttcttgtaaatcttttgcccttgttcttctttagaaatttgctgaacttctttacaatcaagttcatgctttcatcttcttcttcatcactagagttttcatccttctctactttgggtgctgcagtttttagtgttattcccttgctttttctttctgcatcttcaccaaaagttagttgagacaattcaaactcatattcaagtaacttaccaaagagggcagccatggtcattttcgaaaggtctttggattccttgatggctgtcacttttggttgccaagctctagtgaggcattttagaatcttgatgttcaattcttcagcatcaaatgtttttccaagacccaagagatgattcactatatgtgtgaaccttgtttggagctgagaaatgctttcattttgattcatcttgaacatttcatattcatgaatcaaagagtgtttccttgatctccttacttcctcagttccttcatgggtgatctcaagcatctcccacatctctttggcacttgtacatctaacggttctgaaaaattcatcagaggaaagagcagaagttatcatgttcttagctttaaaatcatattgaacaattctcttttcatcatcattcatctcatctcaatctttgtgaatcatgttattatctactaccttgatgggcaccctaggacccttttctatggcattccatgctcctggatcattggattggataaagatcttcattctatttttccaaaaactgaaatgctccccctcaaacaaaggaggtctgttcaaagatgcaccttccttgaaggttatttgtgaagtattcattttgaaaaaaaatgatcttgaatatcttacaagacccagctcttgatgccaattgtaaactataggaacacttcacacttaaccaagaggggggtgaattggttaggcttggtaaatttaaaaaatttattaatcaaaattagagtttttccctttgtggatctttatcacattagaaaccaagaacttttatccaaagattaacccaaaagatgtaatgcttcaagaactaagatgtaaatcaaaattgacaaagaagataatcaaatatgcagaaaaataaagaacacaacaattatactggttcacttcaaacactatgaagctacatccaatttttttctactcaacactagagtagagttccactattgtaaattttagttcttacaagattattacaagtatctctttatcaaccctagataaagttcagagatctaaaaccctattagatccttagagaccaaatccagctgagaacactacccagcaacacttagagaaacattatctctaaaatacaagcaagaaccccactttcaatagaaaatcaaatacaagattcaacagagaattacaaacacaaagagtaaggaaagaaagcatctgatgatccaaaagataatatgcataagaatgaatataccagtttgaatgcaaacactaaattcagaacaagtctttccttaaactttgacaagaaaatcttgcttcactcaatcataaagacccatattggttttgatggaagcaagaacttaagaacccagaaaaatcactttgtgaaagcttagaatgcctttagaatgctcagaattcgaaaaactcaagttgtgaaataagctgagcaaggattcaatttatagaaagatttgtaaccgcctgtaatcgattaaatgcgctcatgtaatcgattattttgcatatgtaatcgattacacaagctcctgtaatcgattaaagtgttcataaacattctgggcagcattaacgagcaatttaatcgattatcccgacgtgtaatcgattactccaggcactatgtaaaatgagtttgtactaagtaatcgattacaataattggtaatcgattatgccaggcattctgtaaaacatgtttgtactatgtaatcgattttgatgaatggtaatcgattaagataggcatcatgcaaaacatgtaatgaactaagtaatcgattataccagcgtggtgctattttctgcatgagtaatgtaatcgattacggcttagtagtaatcgattcaaaagttcataaaggcaaattatttccattctaagttaaaataatcgattaatccgatagtgtaatcgattaaactattcttgataattttccagaaagcttcaagaacaaaataatcgattctttgattgttttaatcgattaaatcagtgcaatgctatttttccaaaaacacttagcttatttcatgattcaaaacaattacttaatgcctttgttatttaaacctaaatgcttatgaatggtatgaatgaaatgacttggatcatcagaaacttccttcctttcacatttaatcacaaacttttcttcaaatcttcaaacatgtcgaaagcccaaaacatttccaagtcttcaatttctcttcatgcttcaagtaactccccctcaaatcaacaaagatcactatctttcataaagaaaatgaataccactcagattactttcaaagagggtgcctccctaaatcgtccaccgatgtttgagggagtacacttcagttttgggaaaagtagcatgcagattttcatccaatctaaggactccagtgcatggaatgctgtagaaaagggtcctttggtcccaatgaaaactgttgatagtaaattgattcccaaagaatgggatgaaatgacagatgctaaaaaaagaatagtgcaatatgattttaaggctaaaaatatgatcacctctacactttcttctgatgagtttttcaggactgttaggtgtaaaaacgctaaggagatgtgagaaatgttagaggttactcatgaaggcacagatgaagtacgaagatcaaggaaacatgccttgattcatgagtatgagatgtttgtgatgaactccacagaaaccatatctcaaatgcaaacaaggttcgctcatatagtgaatcatcttcttggtcttggaaagaattttgatgttgaagagttaaacatcaaaatcctaaaaagtcttaaaagatcatggcaaccaaaggttacaactataaaagaatccaaagatctctccaaaatgtcaatggctgcacttttcggtgagctacttgaatatgaattagaaatgtctcaattaacacattctgagaatgtagataaaaaaaaaagtatagctttaaaagttgcaacatcaaatgtggagatataagaagattcaagtgatgaaaacctgaacctaatagtaaagaaattcagcaagtttatgaagagaagcaagaacaaaacgctgtcaaagttcaacagcaaaaaagacagcaacaacaacaatccaccaacttcacatgctttgaatgtggaaagcctggccacatcaaatctgattgcccagttttttttaaagaagcaacaaggtgaaagcaggattaagaaagaaactaggccaaagaaatcatatattgcttgggaagataatgaatcgacaacatctagatcaactagtgaaaatgaagaagaaacaaatgtttgtctcacttcaactctaagtgatgatgaagaattctctagtactgaatctgaggtaaattctaaatatgatcaaattgttgatgctttccatgatatgcataatgaggctcacaagttagcaaaatcaaataataagcttaaaaaagatttaagatggaacatcaccaaacttgcagaaatgcaaaatgaactttgtaaattgaaagaagagaatgaaaaattgctttcaaattacaaggccaatgggtgtctatgtccctcttcctcctctaagattgaaaaatgcaatttgttacaagaagagtttgatgatttcaaaagaaataaaggagaaaagtatatgtaactactttttgaaaacagctacttgattgatcttttgaaaaagttttataatggaaaatacaacttagctgaaatattaagtgtgcaaaatatgcaggagatacttctggattatgttacaaacaaggttcaaaacgttttggaaaaactgtatttgtaccaccaaaacagaagaatcaaaggagcttttataaatctaagtttaatcaaaatacttactttggaaaatcatcaaaagttgtaacttgtggctactgcatgaagagagggctacatcttataagttttttgctagaaaatattatgtactaaatggagaatgcatttgggtgccaaagaaaaagaaaatagctaacccctatggctcaaccttaattgggtacctttctttgctacttgatttgaattttgcaagtgtgtcttagagcaaaatcatcactatggtatcttgacagcggttgctctagacacatgatcgatgacatatccatgcttacaaatgtcaaactaaaagatggaggatttgtcacatatggggataataacaaaggaaagataattggagaaggaaacataggagacaacctcaagactatgatcagaaatgttctatatgttgaaggattgaaacataacctcataagcataagtcaactatgtgataaagggttcaatgtttccttcaacgataactgttgtttgatctgtgatagtcaaaatggtgaggttatacatgttggtaagaggaaatgcaatatatatgtactttccattgagcatgcattcattcacaacactagttgtctaatcagtaaaactaatgatacttggttatggcataggagagcaagtcacttgaacattcatcatatgaataagctcattagaaaagacttagtcattggattacctaagctcaaatttgagaaggataaaatatgtgatgtttgtcaaaagaggaaacaaacaaagaattcctttcaaagcaaaaatgttgtttctactactaaaccccttgagttattgcatatggacttatttggtccttcaagaactatgagcctagatggtaattactatggtcttgtcattattgatgatttttctagatatacatggactttgtttataagatctaagaatgatgcattcacagcttttagaaaattaaccaagactattcaaaatgaaaaagcttgcaatattgtttcaataagaagtgatcatggtggtgaattccaaaatgaaaattttgaaaaattctgtgaggaatatggaatcaaccacaattgttctgctcctagaacacctcaacaaaatggtgttgtggaaaggaaaaatagatcccttgaaaaaggtgttagaactcttcttaatgaaaaaaacttgccaaaacatttttggcctgatgcagtgagtactgtttgctacaccttgaatagactactcatcaggcctcttttgaagaaaacttcttatgagctgtacaaaggaaggaagccaaacatttcacacttaagagcatttggctgcaaatgttttgttttaaataatggtaaagattctcttggcaaatttgatgctactatctttctcggttattctttacaaagcaaaacatattacaaacacaatttgacatacaagttagaactaaacatcactgatattgcaatcgtgaaggatagttccgcctattgtgaccaacaaccttacaataaccacatcttgtacgagtcgtcgatctttcccgtgaatcgatttcgtttcgtaagcgtgtagtcttgggccttcctcttcgacctcttagtgacacatctggtatgacggtgggttgtccagttggtggtatgaagtcctcgtttccaattggaaaccgctgtggtgaatataattgacattgatatgcgacactatatacaaggtctatatattgattgggtttgtggtgtgtagatcggcatgctgcaataacatgactacaaggggacctgaagacagtgaacaccacattgacaatttctttcagattaggagaccgaccatttcttaccactctgatgagtaagtatgttgtacgactcttgtacctcaaagattgtcttcaatggttcgtaagaagttacataatgtgtcgcagatttatcaaccaacttcatatatttttggcatgcaaatctacacaaatgattacctttcgccatctcctcacgcgcctcctgaccatgttgcaaaaagtatgccaccagtcgagcatatgtgaaccgcacaagtgaagtaataggaaggtttctggcgcctttaagtaccttgttaaaacactttgaaagattggttgtcatgtgaccaaaccttcttccctgttcatcataagctatattccacttctccattaggatgttatcaatccatgcggctatttgagggcttgtttctttaaatttttctaatccggcatcgaaatctaagagctaggttgtataagctgcatatacaaacacgaggtaaaaatcaggacataaaatcagtggagtaagtggacgtaaaaacaatgtcgtataggcagacatacctaatttcttcaatcatttcttcaacatgacattcttgaaattgtgattaaaattactccctaaatggcgaatgcaataaacatgatatgccttcggtggttgccatcctagttcctcatggttcactgccgccagtatgcctgcatgccgatctaaaattagacagattccctctttctgcatcacatgaatccgaattagtgtcaaaaatcacgaccagttgtcaatattctccccggaaacaacatcaaatgcaattggaaggatgtaattgttgtcgtcaattgatgtagcaatgagcaatgttcccctatatttcccattcaaatgggtaccgtcgatgttgataatgggtttgcagtaattaaaagcatcacaacattgcttaaaagtccaaaacaccatcttgaagaccttagcacttccatctagttgcccatcaataaaatggtcattcgcctctagctaatatgcagacccttgagcaaaatttaacatgtcacccaaccaccttggtaggaacacataggactcttcctaatccccgaaaaccatcacaatagccttttgctttgccttccatgccttcctgtatgatatatggaatctgaaagttgttgcaatcctttcctgaattaatccaattttaatactggggtcctccctaatcatttctgcaatttttcaaacgataacatattaataaatattacaacaaaataaaaagtccaacataacatattttaagtacctaagatcaacgaacatatcaaatttgagtcaagcagcttgtgatcttgagaaagattctgacaaacacatgtgtgttggttgttccatatgcgtacaacccattcagtgccaccctttttttggtatgccctcatcctccatgcacaaccttcattatgattttgacaaaccattataagccttttcatatcacttttttctaccacggttgtgtgatgctcggccatatagtattgctttatttccatttgcacatcaaacttactcgcaaacacctggtccttatatagctcttgacccgtctaccagttaggtatctgcactccttgcatgtcatcaaacttctgatctggatatgcccaattaatattcgtataatggtttatgttagaccaaaatggtacattgccctctcctgtataataagacattcaacatattgttttattaaacccataattttttaaacactactgactaacaaattgttgtgcatccatacctacaaccagaggcaggtcttgcattcagacaatgcccggagaaggaattgggatatcacgatcgaaatcaccatctacgtttgtattcgatgagtcactatctggaataacaccttcgtccacctcttcctcagaactgtccataggccaagctgggtcgtgggccagcaccatttcagtctccattggttgagttggtggtggtggtggagctgatatatccatatgttcaaaatccatttgctgggttggttgggttggtggtggtggtgatggggatacatctctatattcggtatccaccagcgactctctgttaatgtcaatagagctaatgtgtggaacaaaatgttgattgcttgactgtccaccaccgtttaattccgcatataattcgataaatctcgaatctcctctgtcggatgtgcatgcgtctgtaactaagcctacattgtcatcatctacaatatccacaccaatccactgcaccgggttgcccgatgcacatctagcactcaatcgagacatagattaaccctgttgtaatttcaacttcttgtaaatcatttttatcaaattctgatagctgcatcctaaaggcatacaaaacattttttctccttcaaagactagaccattcaatcctatatatttccttccattataatatacaatggtgattaaactatttctattaccactcattttgcaaagattcaagcaacaaaattatacaactttcgattcaagaagagagaatgtgtgtggaaatggaagagggggggttgtaacaacctaaaaatttattctatatttataatttatttattaattacttaattatttatttacttatttttattttattttattttatctttttgttttcagcttaaaaaataattgaggtagagacaaaaaaaaactagatatatatatatatacatcatatttcattacataccactttgatattacattgctaacatgatagtgcttcagacatttttatttagttacaaaatacacaaccctcattcaaacatagtctccagtactatcctcttcactgggcacaattatggggtctgtgaccgggtttagatacataggagtaaattgaaagaagggatcagatggattaaaatcttcactcaaaacagaaattggaaaatgggctccgaagtagatgtgagcacgcagaaccggctgcatagttactacatagcagtttctgacttcatcaatataccatgctatgtccagtgcatcaaggaataatatgattgaagccatctaaaataaaacattggacaaatctagtgagaaataaatttctcaataggcaaatctaatccatcaaacacgttagaaggttagtaaatcatatattttaatgaatgcataaatgcttcaatgattgtatgaatgcatgaaatgaaatggtcacaggtgcacatggcctctacatatgtacagtatgtaggtatgctgcggccgtcttacgctaatcatgcatgaatttccatgtattagcacctgatctctttacatccttgatatagatgtagtatcataggtccggtctcaaaattggaaactcgaatcaatcttatttatacctcaaattccattatataatataaggaaaatattgctattcttccatatcagtaagatggttaacacttcatacctggtccaagtataattataccaactaaaataaatttatttaatattttcgaggggttgattttatgttagtggtttaatatatggattatatagccaagaccgggttggtgaaataattagaaatgatttcatcatgtatacttaccatagttagagatatatttatcatagctggttgtcataaaatatagtatccgggatggaccaggataactatcctcggaatatttgtagcatggaaagatagttttgaaataaatgggttgaatatccctggatagttagtatggtggtttacttatggttttatatatatatatatatatataaaagattgtgaaatgtcctgactaattatttacttaagttgatatctacatctgggattgtagtgtacgagttgaaaaacgataagaatacttcaacacaaccaagaggggggtgaattggttgaaccttggccaattaaaattttaaaatcagagttaccacataatctttatcactttcaaaaattatttcaaaaccaagaatcaatattcaatcaaatttcttttacaagaagaatagaaaacagagtataattttatgtgcaatgaaattgattcacaaacaaagcaattaagagattaacagatgagaagaaagattagtccagatttttatactggttcacctcaaaccctatgaggctacatccagttcttctactcaacactagagtagagttccactattgtaaaaatatccttacaagcaaatttacaagcctctcttcatcaaccctagatgaagttcagagatccaaaaccctattagatccttagagaccaaaacccacactgagaacactactcagctgtcttttagagaaacactatctcacacttgcaagaaactcaattacaatagactaatccttacaaatattcaaagaacaagttacaccatcaaagaataaggaaagctatcacctgataatctaagaatgaatgcacatgaacgaatcacaagtttgatgacagattatcaacatatatgcaaccttttccttatgctttgagtgaatgaggcttcaccttcttgaatcaaaaacccatatgaattttgtgaagctaagtgtgtttagaactcaaagaaactcactaatgaaagctcagaacgtttgtgaaagcccagaattcgaaaaatcaagagttacaaacttcagagaagtgagttttatttataacagatttttaactgaaaataatcgattaaacgcgctcctataatcgattatttatcatttgtaatcgattaaatcaagactgtaatcgattaaaatgctcctaatagtttctgggtttaggctatgaacaatataatcgattattccgtgaagtaatcgattaaaccagtcagacatgtattctaaatgagcttagtaatcgattaatacgatatgtaatcgattaagacagtgagctatgttttttctaagtctatatgcataggcttgtaatcgattaccatctctaggtaatcgattaagacagagagttccatttttcataaaaagccttagtaatagattaaaccgatatgtaatagattacaatgatcatgatttgttttctaaaggcacgaagaacaaaataatcgattctagtatatgtgtaatcgattacttcagtaaaactttgttttttcaaaaactttaccttttaaatgccttagttatatactgcctttgattaaaccttttaatctaatgatcccaaatgaatgattaatgcatgatgtgcacaattggattatcagatcatatacttccttttacaattaatcaaattggttttcaatgctttccatggaactttgcctttgagcatgttttgaaagcacaaaacttttgagcctttgattcttgttcattgatgcttggcttcacttgaatcaacaatctcccccgttttggctttaaacatgccaaatccttaatttgattaagcactattacttggagatcgaatgtgtaaagacccttattcatggcgcttaaccccgcgcgatagcgcggggattcaggtcagaaaaccctgcagagggtgtggcgcgggtcgcgccacaggcgacgtggatcgcgtgggatgaggcttagaaaaccagattcttctctggtatcccacgtgggtcgcgtgggggtatggcgcgagtcgcgcggagtctcggcaggttcacgcgagtcgcgtgggtgctcacgtacctcgcgtggaaggaccgaaagtatgacgcgagtcgcgtggtgtacggcgcgagtcgcgtggtatggtggcgcgacgtacgtggtttcgggcgcgagtcgcgtgggaaggtcggtggagcgattataagaacgaaggtcgcgtttttcagagggaaaaaccctcttcctccttccccacgaccccaacagccattagaggcctccccaagctttctagggccctatatcttggcctaaacaccttcccatgggctttgatcttgagaggaacccttgagagcgagaatccttcctccctattccctaaaacccaagttctgagaaaccttcagagaggttgagagaactcgagattgaggaggaacggcgaatacacacggacaccggagctaggaggaacgtttcagaggtcgtctgtgtcgccattgaggtaagaaactcgagtttctccgtttgatttctgtcgggggttttggatgaatagtgacccatctgtgattgggctagaattagctctgggtccagttgagagaagtgtttagaatgatgtgaggaggaaggattagctttcaatttgtgatttggagaatgttagttttggctctaggataggcatgggtgactgtggttgagtcacttgatttggaacatgccagagcctgagtgatgggctggtggtgcctgtgaggccaagagaacggagtctagtggattagaccgttcaagccctgagaaaccctgtgattaggggttgagtgagctgagaagctcagttcgatggctgaggttgagtctgtggtgactctaaagccatgattgatctgtatagaccactgagggtctatagaaaggcttgtggtgagatgaccctgaggaaccttaggcaggtgacctaagttgatggagaggattgtgattcctttccctgaggcaggggtgactgcctgatgagcttatgtgttgttgaatggtctgtaatgtatgttgtgtgccttgacagggcttgacacttcgagtgtcagtgaagcagaccatcaagccaggagcagagctgtgaggcacggctaagaggtaagctcatcgttctggggattcgtcccttttcctttgtttgccaccctgatgggtgatgtaatgcatgccatgcttgtgtgaacatatgtatatatatgtatgtgggcatgctgtatggatttgaaggccatgtggtctatgagttatgatgtatgctatggcctagtgtgtgctgggctgaaatggtaaaccctaggataaacaccgagtggtgtgagatggccttgggcctgtgaatgatgatcactgaggtgctcagtgttggaacctataaggtactgcgatggtatcgggctagctgaggttccctagccagtggaagggtttgaggactccctggaacggctggtattccatgggaggtgccacggctctccagtaagtcctaaggactgttgaacctgtgtggaggttcttccttaggcgtttgagttgaaagacttgagtgatggtgctccctgtgtggaatgactcctcaggcacttgtggattagtaaagtcctgtggatggtgctcccgtagtggaatgacttcccaggcaagtggtagtgacctgtggatggtgcctccgtagtgagatgacttcccaggtagtggaaaacccgtggatggtgcctcctgtgtgagatgacttcccgggtagtggtatgacctgtggatggtgcctccgtagtgagatgacttcccaggtagtgagaagccctgtggatggtgcctcctttgtgagatgacttcccgggcagtgaaagtcctgagtgctggtgcctcctgagtgagatgacgcctcaggccaggtggtttaagtcctgagtgctggtgcctcctgtgtgagatgacgcctcaggccagtagtggaaagtcctgagtgacggtgcctcctttgtgagatgactcctcaggccagtgtaggaacctaagagacgtgtgcctcctgtgtgagatgatctctcttaggcatgagggtttaagtcctgaggatggtgcctcctgagtgagatgacttcccaggcagatggtttaaggtcctggatctgtttcccaggccagttagtgacagatatgttgtatctctaagagagggcttctcaagggggagaagagcctagagcctcttagacgagccatatctggatatgtgaagtcctgagtgctagtcctcaggcatggtatgttagtatgagacgatgcgtctctgggtgatacagtgtcaagggagtgacactaatggtaatgtacctctaggagacaggctgcgaaagccagagttagatggctggaccaggggcatggtttagacccctgagagatggctctaggagccagtgagaggtgtagacctcagatgccttgggcatctcatgttgtgatcccagatggctgggagtatggggatgagctgagaatatatctctagctcttttctctgtttatttttcgaatgtcttggtggtgaatcagggtgagggaggtttcccaggaccctgagcttactgagacgtatgtctcaccctgtttggggtttgtggttttcaggtgcttctgctggagcagagaagcgacctcagggcaggaggccctagtgaagatatcaggctggaggaggctgcagttgaagaccggtgcagagcttccagagtgggagctggtttaggtcggttagagatagggtgtgtgtacacccgattctgtacatattttataaatgaccgcctgtgatcatgttttagagcatgtatatgtacattgtcagatggtataggttatgttttctcctgagtatatttgtatagtatgtatctgcctatgttgtgtatgttttatctggatcagttctgtctgttttatgctttagttgtgtttgaaaattcatacataatgtaatcaagataaacgatcttgtcgcttccgcacaccgcatgtacaacgcttttagcgtggtttggtatcattaatgttagcacgtccggggtgttacagaatgtcaaattccttgtttgaatatgcttttataaacctgaaataatcaatatctagccaagaaccaagtgttaaagtacacattgctcatgagtaattcaaataagcactataccaattgattagtttccatttaacacagttactccccctcaatcttagcatccattcaattcaaaaaattttgccaaaaaccgaataaaaaacagaggcaaacagaggtgtttgatactactcccaaattgattaattctccccctatttggcttgttaaaagtcaaaaataatgtgagcacaacggattttaaactggaattgcatgactttattaataggatagcatatggggcagttacataatggaatttaagcactgaacataagagaaaatagaacataacatagttcattccaaatagaaagcagatcagacaaaatctaaatctaatcaaaacaaaataaaatccattacacagagaaggtagatcagccaaaaactaaatctaattaatcctagaattctgcagaggcttgatcattcatattagcctcaatagcatccagcctttccttaatatcttctaaggctccatgagtttcagccttgaagtcctcttgaagcttcagcattttgtccatcttttgaatcatttgtgattcaaaatcagagaaggcttgaggtgcaggctgtggttgttgttgttgtctctcatcctcaaaatcagcagccatctctccttgctcagcagcaccaatatgggcagccattacccagccttggggtgtcttcctcatgcccatcttggttagatgcttctccttaatttgactgttgtaggagagagtgttgtctacaacttcattttcaacatctatgttgaaatgatctatgagccttgaaacaaatacaggataggggaaggggtaattaacaaaccttttggatttcagcaagatctcttcaaagatcaaagcccaattcatgaggatatggttcttcaacccatataccaactgaagatcttcatcagtggcttgggcatggttggttacccttggggtgatgatgtatgtgattaggtagtgcagcatcctatctgctgcagtcataggacctgtgccaggcctggtcttgagcctcatgtttgggtcatgaagcatgctcctgtaggtatccatcttactgtacccatcaggatcttcatcaaatctacgagctccctcacagacaattccatccactgtttcccaaatttcaggggtgatgtgcatgactacccctttaaccttggacctcatatctccctgcatagaacccttcaagcaggtgtagaaaactcgaactagatcagggtaaaaggtacccttcatctctagaaacctcctaaggctttgtgactctagataggctgggaattggaatccttgtttaataaaccagtcaagctctatgtatttgggtgtggccacaggcttagtggcattaaactgaaggtagtttatcttattagtctcaatagagaaccaaaggtcaagcctatcaatgggttgttgttgaggttcaggttgaggttggggttgagaagaggattcaccgtgtctcctctttggtttcctaactcttttggaagtaggctcagacagacattatacagactagacacaagaaaagtgcagaacttttgcagagaatgtagaggagagaaagagagttggtgcattgattcaagtcactcagtacactatttataggcaagtgttaaagcataaacgtccatattttcaaaaattatagcagttgggatggtttaatgacattgggtgttgttttagcattgattgggccgttaataaattcacaaactccagccagttttcagacaacagtacgaataatcgattatttcgttgtgtaatcgattattccagttcaattaggtttctgttaaacatgtggtaatcgattatttgcataagtaatcgattattttatacgagatcaaaggttgaagaagacttgtaatcaattcttttcatatgtaatcggttattccggagcttttatcaattaaatcaagtatcatagccatatgtaatcgattatcccgagtggtaatcgattatcccagagtgagcatcatttcaatataaatggtaatcgattatggctcataagtaatcgattattccagagagatgtgcttgtagttttgggattttgaacactgtaattggttatcccgatacgtaatcgattattccagaggaaagtgatttctagaaatgtgaagaataatcgattaccattggtgtgtaatcgattactacagagcattcatcatatacagagcattttagcagctttttgacaatgatacaaacacacaagcatttaaggacatataggctttcgcaaaccatgcaaaccacaaacaaaacaagctagataatgttattctcatcaaggatccttagcatgtttctaagtgtataaaatctatcccttgaaagtggttttgtgaaaatatcagctaattgatgattggtgtcaatgaagtctacctttatgttacctttttgaacctgatccttgaggaaatgatgccttatctcaaaatgctttgttcttgagtgcattattggattctttgatatgttgatggcactagtattgtcacatagcagaggaatagcctttatttccactccatagtcaagcatttgctgtttaagccataagttttgagcacaacagcttccagctgagatgtattcagcttcagcagtggaaagtgctacacatgattgcttcttgcaatgccatgagatcaatgagcttcctagcatatgacaagtaccacttgtgcttttcttatctaatttgcaacctgcaaagtcagaatcagaataaccaatgatatttaaagaagcaccttttggataccaaagaccaactcttggtgtagctttgagatatttcagagttcttttgacagcagttaggtgtgattccttaggattggcttgatatctagcacataaacaaacgctaagcatgatgtcaggtctgctagctgtcaagtataacaatgatccaatcattcctctgtactttgactcatcaactttctttccactttcatctgtatcaagatatgttgatgtagccatgggagttgcagcatctttgctcttctccatctcaaacttcttgataatctcaagacagtacttggattggttgagaaaggctccattcttcatttattttacttgaagtccaaggaagaatgtaagttcacccatcattgacatttcaaattctttctgcatagctgatgaaaaatctttgcataacttgtggttagtagaaccaaatataatatcatccacatatatttgaaccaataagaaatcattgccaagccttttgataaacaaggttttatcaacactccccctaataaaagattgttcaagcaagaacttgcttaacctttcataccattacctaggggcttgtttcaaaccataaagtgcctttttcagtttgtaaacataatttggatgtttaaaatctttaaaaccaggaggttgttcaacatatatttcctcctcaatgtatccatttaaaaatgcacttttaacatccatttgaaaaagttttaatccatgagacatgcatatgcaagtaataacctgattgcttccaatcttgcaactggagcaaaagttttcttcatagtctataccttcctcttgattgtagcctttagccaccaatcttgctttatttttgactatgattccactttcatcaagcttatttctgaaaacccattttgtgccaatgggtttaagagatgaaggtctaggaacaagttcccaaacttcattcctcttaaactgatcaagctcttcatgcatggcatgcatccaatgttcatcattcaaggcttgatcaatattcttaggttcaatttgagaaacaaaagccatatcacaacataggttctttaatgaggattgagtagatactccctttgaaacttcacctattatgttgtcaagtgataaatctctagttgttctccaatctttaggcattagtacaggagttgtggattctgtttcagttattggttcttcgattttgattgagggattgcctatatgaattatttcttccagctgacctgcatcattatccaactctttttcctccttagagagattagattcatcacaaatcacatgtactgattcttcaatgcacattgttcttttattgaatactctatataccttgttatgcaatgaatatccaaggaaaattgcttcatcagacttagcatcaaattttccaagtgattctttcccatttttcagtacaaaacacttgttgccaaaaactcttaaatgagaaatgttaggctttcttcctttgtatagctcataaggtgttttctttaaaataggccttataagtaatctattcaaagtataacatacagtgcttacagcatcagcccaaaaatacttaggtagatatgattcattaagaagtgttctagctccttccttaagagatctatttttcctttccacaacaccattttgctggggtgttcttggagttgaaaaattgtggttaattccattttcctcacagaatttttcaaaaagttcattttggaattcaccaccatggtcacttcttattgaaacaattttacatcctttctcattttgagtaagcttgaccatttttctaaaagcaaggaaagcatcactcttggatttcaaaaacaaagtccaagtgtatctagagtaatcatccacaatacaagtccataatagttgccacctaaactcatagttcttgaaggaccaaacaaatcaatgtgaagtagttcaagtggtctagaggtggaaacaatgtttttactttgaaaggagttctttgtttgtttccccttttgacaagcatcacaaagtttgtctttctcaaatttgagttttggtaacccaataactaaatcttttctaatgagcttgttcacgtgatgcatgtttatgtgacttgctcttctatgccacaaccaagtttcatcaactttacttattaggcaagaagatttatggaataatgcatgatcaattgaaagcacatatatattacctttccttttgcctatatgcagtacctcaccacttttctcatctgagattatgcagcaatcctggttgaagttaactttaaagcctttatcacacagctgacttatgctcaataaattgtgctttagtccatatacatacagcacattttttatctttgccttaatgttgtctccaatattgccttcaccaatgatcttccctttgttgttatcaccataagtgacatatcctccttcttttaaagtcagatttgagagaagggacatgtctccagtcatgtgtctagagcatccactgtcaagataccaagttgatgtcctagctcttagacacacctacaaaaagcaaatcagattttgataaaaggtacccactcaaggttgggtccataggggttagcatttcttttgactttgggaatccaaatgaaatcaccattaggcacatagaatcttctagcatagcatttatgtaataccttaaatttttttaagcttgtgattaagcctagattaagccatgattaagagtaataagtgtgctctaggatccctaagagaaaagcttaagaaaagaaggagaaaacagtttcgaacaactggcgctaaccgcgtgggatccggcgctaaccgcgctgttggcttaaacaagggcaatccttgtggccttctaacgctattagcgtgggtcatggcgctactagcgtggctgatttgaatctgtggcacggatagcgtgggatatggcgcgatcagcgcgggaggactgaaacaggccaattcttgcggctagatcacgcgatcagcgtgggcatggcgctagtggcgcgagtccttcgaagcatggcgcgatcagcgtggcgtctggcgcgatcagcgcaggactttcgtttcaattttataaatagcttcttttggacgaaaactgaagggaaaaaggagagagagagagagggaagccattgatggaccattgagcttcatatcttcttcattactcatctaaacacctccgacccaattgagaaagtgttcagagcttcgagataagctagtgacctagctttattctcgacaagaggcggtaaacggcgagatcgcgatttctaagggagtccttggaatcgaagaatcagaggcaaaggaagcttcgattgagcgatctaccttagggaaagtgattccctggtgtgtctggattacacagaggtaagaaactcgagctttagccgtcgattctgtgtttgggtttttggtgggttttgtataccttgagagctgtttttggaggtgttagagccgttattaggcttggactctgtagagttttatgctcagagggttgttctgatggagttagagccttgaatcatcattattgatgaagtttgattttggttttgagtatatatgagcagaggaaaaagggctagtaatatgactagtgtgaaccttagagcagttgacaaagttgttcatgagatagtatagatgttatttgtcatctagaattagtgataatgagaagtttggaattgatctgtataagcagggatatgctttgatcagagtcatggtagagactctggagccttgtgtaggctgagtaggatccttctgagggtctgagaatcacttgtgaagtgattgttatgggttatgagaaaggaattgtggtttcctttcggtttaaaggcttagaaccgttattgataccttgtgttcttgttttatgtaggacgtgagcttgatagctctggtggtgttgaccacaaggccgggagagccagtgtgttgcctagagcaggtaagctcttggttcttgtttgtgcatcctttgctgagttccaccattatcttattatggtgatggttctgtgtaatgttatacatgtatatgtgaaaattgtgtatcgtgactgatgattgaatattgtgctattccctgtgaaagggaaatggatgtacattgatatatgatgcttgttttgtgagctatgccctgagattgggtgattgttgtgtatggccatggtttgcctagcttattacctgcatggttgattgttgtatcctactgtagtaggatagatgacatgtgattgagtaagtcccgatatgagatgttcctgtgatatagacgtagcctcccgaatggagatgttcctatatctacagatgtagccttctcgggcaattgtattgagataggatggagatgttcctgcgatatagatgtagcctcctagggagatgttcctatatcagcagatgtagcctcctggtaaagagatgttcctgttatatagatgtagcctccaggtggagatgttcctatatatacggatgtagcctctggtagatggattgagatcctgctatgagatgtttcctagtatatagatgtagcctcctggttggagatgttcctatatatctagatgtagcctcagcgggatagtgttggatatgatcatggttgtttgccatgagtttaacctgattgtggtcaggtagctgtgcattggttgtgcatgagtattgatgagtgattcactgattgtggtcaaatgaacacatattgatgatgattgatttaatgatgatctgatgctgttgtggattatttgatatactattttcatgtatatgtgtatggaagtgaaccaggggaaggaaataccttcaagggccctgagtttactgggattttatatctcaccccgtgtgtggggctattgttttgcaggtgaatcctcaggaggagctgatagatcccaaggcaagaagcctgtgcagggatagctatgttttgagaaccttaggcttagatgatttgagcctgtagctctgatacttttgtattctgcctttggtttagtcttgttgtaccctgaggagatgtatttgtacagttttgtacttaaatacagattatttgtatattcaccatgttacgtgtactgcgttatgatagtaacccctgatgatgtcactttttagttatgcttccaaactgcttaaactctgattattgtttttgtgttgatgtttatgcttggtaatgaccctgatgaatgagggggcgttacaatttaaaagatgtgtgcccattcttcatacaatagttgcaagtaacacattttgaagttttcccaaaactagaatatttgttgactcttgagttcttttgccacttttgattcttctattttggaggtacagaaactatttttccatatattttgaaccatgtttataccccaaaccagaagtatctccagcatacttttgcacactcaacatttcagccaagttgcattattctttataaaactttctcaagagatcaatcaaataactattattggataaaagcaacatatacttttcaccttgactttgtttgtactcatcaaaatccttttgaagcaagttatacttatcaacattgcttgaagaagtggcacacacacatccatttaatttggaactcgaaacaagtttctcattctcttccttcaagttgcaaatttcattttgtaaatcagttattttctcaatatgccactaagatttcctttgagcttattattggatttgcaagtttttgggcttcctcatacatttcttgaaaagcatgaatagcttggtcaagttcagaatttacctcttcttcctcacttagcaaatcatcatcatcatcattgatggtggaggtaagacacatgtttgcttcttcattttctgtggaagaatctgaagatgttgactcattatcctcccaagctatgtatgccctctttccttttccttcctttttcatcttgctctcagcttgttgcttcctcaagtagattgcacattcagatttgatgtgacccgatttgccacactcaaagcatgtgaaattgttgtcaatcttcttgttgaggttgttgttgatgttgttgtttttgttacctttggtgaatctcttattcttgtttttcctcagaaatttgctgaaccttttgaccaccaagatcacattgtcctcatcatcctcttcacttgattcctcctctttttcagctttcaaagttgctgctttcaaggctatgcttcttgttttcttttttgcatcttcacgagatgttaatcgagacatttctaattcatattcaagaagcttaccaaacaatgcagccatggacatttttgacaaatccttggactccttgattgctgtaacctttggttgccaaggtcttgttaagcacttcaatattttgatgtttagctcttcagcgtcaatgacctttccaagacccaatagatgatttactatgtgtgtaaatctagtttgcagctgagagatgctttcattggaattcatcttgaacatttcgtactcatggatcaaagcatgcttccttgatcttctaacttcctcagttctttcatgagtaatttccagcatctcccacatttcttttgcacttgttcatctcacagtcctgaaaaattcatcagaggaaagtgcagatgtgatcatatttttagctttgaaatcatattggactactctttgttcagcctcagtcatctcatcccattctttgggaatcaactcatttgcaacaattttctttggaataaagggacccttctcaatagcattccatgctcctgggtcatttgattaaataaagatcttcattctatttttccaaaaattgaagtgttccccttcaaacattggaggtctgtttaaagaggcaccctccttaaaggttatttgagaagtattcatgtttctttttgaaaagaaaagatgatcttgaatatcttacaagaaccagctctgataccaattgaaaaacgataagaatacttcaacacaaccaagaggggggtgaattggttgaaccttggccaattaaaattttaaaatcagagttaccacagaatctttatcactttcaaaaattatttcaaaaccaagaatcaatattcaatcaaatttcttttacaagaagaatagaaaacataatataattttatgtgcaatgaaattgattcacaaacaaagcaattaagagattaacagatgaaaagaaagattagtccagatttttatactggttcacctcaaaccctatgaggctacatccagttcttctactcaacactagagtagagttccactattgtaaaaatatccttacaagcaaatttacaagcctctcttcatcaaccctagatgaagttcagagatccaaaaccctattagatccttagagaccaaaacccacactgagaacactactcagctgtcttttagagaaacactatctcacacttgcaagaaactcaattacaatagactaatccttacaaatattcaaagaacaatttacaccatcaaagaataaggaaagctatcacctgataatctaagaatgaatgcacatgaacgaatcacaagtttgatgacaaattatcaacatatatgcaaccttttccttatgctttgaatgaaggaggcttcaccttcttgaatcaaaaacccatatgaattttatgaagctaagtgtgtttagaactcaaagaaactcactaatgaaagctcagaacgtttgtgaaagcccagaattcgaaaaatcaagagttacaaacttcagagaagtgagttttatttataacagatttttaactgaaaataatcgattaaacgcgctcctataatcgattatttaccatttgtaatcgattaaatcaagactgtaatcgattaaaatactcctaataatttctgggtttgagctatgaacaatataatcgattattccgtgaagtaatcgattaaaccagtcagtcatattttcctaaatgagcttagtaatcgattaatacgatatgtaatcgattaagacagtgagctatgttttttattagtctatatgcataggcttgtaatcgattaccatctctatgtaatcgattaagacagagagttccatttttcataaaaagccttagtaatcgattaaaccgatatgtaatcgattacaatgatcatgatttgttttctaaaggtacgaagaacaaaataattgattccagtatatgtgtaatcgattacttcagtaaaactttgtttttccaaaaactttaccttttaaatgtcttagttatatactgcctttgataaaaccttttaatctaatgatcctaaatgaatgattaatgcatgatgtgcacaattggattatcagatcatatacttccttttacaattaatcaaattggttttcaatgctttccatggaactttgcctttgagcatgttgaaagcacaaaacttttgagcctttgattcttgttcattgaagcttggtttcacttgaatcaacacgagtgaccgagatgggactatcatagatagttaagtgtagttggagctcatatagccagtctgagttggttgggtatgtattcatgttgaaaacgaaataatcctagtcttatggaaggtgtatcataagtgatcggaattttcgagatgccgagatgtgtgtgcttggtttgtgagtataaccagtcttgcagaggtaccgaggtgtttacatggtttgtgggtatggccagactggcatgggtagtatgagtatagccggacttgtagaggtgttgcggttatagtcggactagtatggccagtcttgcatggttgtcgagatgtgtgtgcatggtacgtgaaattttccgtaagagcagaggtgatgtgggtgatgccgaggtatgtgcatttggtttgaagatattgtcgggatagtttatagcagaggtgctgaggtaggtaattgataagtgagtagaggtgccgagatatgggcatactaagtataattccggcagtgcagagatgccgagtctcgtacataattagccattatctattatcctaatattcaagtctcgaatttacttcttacgtattgttcatttatgctattcaccctttaattccaaaaattgttattaacatcgtctataaactattaacttactaaaaaaattcacgtattcaatgtccataataatatatattatatgtccctgcatatccttgctaaagaaatcatcgtatcctatttgtaaattaacattgtaaaatttaaatttttaactaaactaaaagctaaatatggcctaataaatacataaattaaacttaattaatttctaatttagagattgaagcctagcctaccttcaataagtctgatgaaatttctgaaatagttttaaggtagaaagtttttacatgaaggaaagaaaaagtggtagaaaagggttttagtatgaagagtgggagctgaaagtgtttcatgtatagattttctgaatgaataggtatttatactggtttatttagttggattttaaatgagttaattgaattataatcgggttaggatttactttggttaccaaataactatctttggagatttttatctaagttaatcattacaaatagtcccatcattaatgcatttcatcaacgtggaaggctgcttaaggcttgattttggttatttgtttcctttaatgacacatgaaccttctaaaagatttttcaaaagatttggactcaactcatgacttatccttgactccataaaaaatattaagttgctgaaggctttattccagtttgagtaataaaatttgtccttattctattattataatttaatcataatatatatatatatatatatatatatatatatattctttgaggatattacaggggttataggaccatactacacctatttcactttcccctccagtgaattcataggaagctgccacgtgacaattctctacgtaatttgcccttgcacctagcgaaatacgtgttgtctttcacgtggcgacacatatttcgctacacaccccaacaaaataggtgtagtactgccatgtgtcttgcctgtttcagccatgagcactgatgcattgacgacatatttcgctagcccctatagcgaaatacatggccaacaaaattgcgacacatcaactaacgtactttgtttggccttgtagtgaaataggacgtgtgacagtatgaaaaatactactgttcacatgacatttaggtatatttttttttaaagtggcactttgatcactgtgactataatgaaaagctgatagatgggtagacaagactaagactgttcgtaataatacagtttgatattgatttttagaagaaaaatttgaaccaaagatagtttgattaagtgtaaaagcaagatgaaatcacaaagtaaaatttaataaaaattacataattattatactatattgatctaaaaattaaatttccttttttaatctatattaaataatatttctctattattgaatattatttcttaatcatattgcgtgatggttttgaaacataaaataaattattttacgtactgagagagtttaaattaattaattaaataatgtgtattgtaaatccctttatatctatctttcatttatatttatatgatatttaacactattaaaaaaataaaattgtgttcttcgttatatttagccctatttaaccatattgatgcattctttttctaacatataaaaataaattatgcatctcaattacaaaacaaagaaagttataatttaatatttattaataaaacaacaaaaaccacgtattataaaagctattataaaaagaattaaattatagatcacatattataactattaaaattttgaaacaatactatctaatataccacgtgctttaaatattttacttgaaatttaatttaattttttaaaacatttctattttattattattttaaagattaatttataaaaaatattttaaaatacagatatattgtagtgcataatataacacaaaatttatacacaaacatattgaattctttgtttttttatgcaaaaatatttaaatgaagatatattttaaggtatatattatcttttgatttttctaattttatactatattgttttattttttttcaatttcttttccccatatattatttggttatttacgtggtgtaaaatatctatcgaataacttgactatttgactaattacttttaatgaaatctttaaagttgtccaggcgaccgaaggagggctatctatggagaattccatgatgcctcaccctcacggagctgctgaatccacccattctgatgggtttacttatacttctgatatggttccagattcgtccagttccgggcaaagtataagtttcgtggaatgaattccaatttgttgactagtacttatcaaatcttgctctataatttaatttttcttttataaataatatgataaagagcatccctttcacaaaaacctacgggtcctcccccctatccaaaaatgaattcaagttcaggttcacgtatccaattttaaaaaataacctatggacaatttaaaaattatcaacttctaccggttagcattctcacttctacatgtcctacactcaaaatactggcctgtggagatctggagttttttttaattagatatttaaattatttctcatttttaaataggtctctgaacttttttctttctttcaattggatttaaaatgttgtatttacttttttaattaggtcttacacaagcataattaaaaaataaaaaaagttcaggtccctgaaccaaatactaattaaaccattattaaaataaatctgtaattttaattaaaaatgataataaagataatattacactttaattttataattataatttttaattaaataaaatataccgaaaattattaatttagttttaattttttattttaaacaaagttgaggagggaaaataaataaaagggaggtgtattccactctagttctgatcatagctaggcccatccacgtccacgaatataaaaaaagaaaaaagtattgtacactcccgccaaaatcaattggcgcgctcgctcgtcatcactgttgatataaagaaaaaatcttcagaaaaagttttcagtgttatacacattctctctctcacacatacacacgcgatctcaccataattcagatctgtgctctctcttcggcgccccgaaacgcagcgtttcgttcaacctcaggtgagcgttcgtgtatctcatctccgtttgcaaaaccatattcttctccttcagatctggaaacgtcgaatctgctttttctttttcattttccccaatttattccaatttgtttccatttcactctaaattttgctttatcgattcgaatgtgactttttatgcctgaaaattgtttctttgtgtattttccctccttagctgcttttaaggttaattttatgggtttttaggagtttctacagattttgtctttcggtttttatgtttgaagagtgaatttaactattgagttaatttttgtttaaattttctgctgcgaactctttatatggagagaggattttgaagctagttatgaatacattcgatttttagggttaatttagccgttggaaatttatggccttttcatttttttagatttttgtgaattcgatggtagtatggttttggatcaatgactatattcttgatatgtttctgaattttggttgctctgtgcgttttggcttgatttgagtctgattcccttttttcttcttctttagttgtcctgattgctacagatttggttttaggtttatgtgtttgttcactgtggttttagtttgcgttttggtgagagcatttcattaattatattgcttgaatgctggaattgatgtaggttgtgcaggttgctttggatatttaccggataggaagaagaaaatattgatttcttgaaacatgtccttcaggtattgatattctactgtttcttggaattatataaattctgtggcccatgtaagtctgataatttagggtctgtttgctttagatttttgaataattgagtttaaaagaatttgtttgtgtttcggaatggcattataatgtttagaaagattggttttatttaggggataaagtagactcacttttgaagtttaaatcaattcttttcaagggaaaagctagtctctcttctcttagaattgcagaattgattttgaaaatccaaaatcagtcgtgaatttgcatgtgctattagtgagttgccttaaatccttgttctaaatgcttgtttttattgtttccagtggtttgtaattcttgacagatttaggggatattggaagaacactgtgcaaagttgtgattgtttgtagagcaatagagcatgcatatggaactacggtgttgtggtcatcttcatttcatccaggctattaaaggtggtttagttacaaaaatcccgaatgttgctcgtggacaaccaaaacttaaatttagaaagctcgctgacatatatgatggcttattgtctcataatgatgatggaatggctgaaagatcatgcttaggtgaaattgaggaaagcgcttttgaaaccaagcccgatgcttcactatgtaatgtcaatgatgataatgatcagagaatcattaacttggatgatgacaactttgacaatttgaccctaagccaacttaaagcaagttgcaaaacaaggaagcgaaaacactcacaaggtctcaactcctctaaaataaacatgaaagttgaagattcgtcaatcctggaggactacagagaggagcaaatggcagcagatgattctgatttcctggagactcttggtagctggaaaactaaactgtcaaagaataagaaggcgaagattaaaaagtgctttgaagaaccaatctgtactcatacccaagatattatgctagttgtcaaatctgaacctgaagagatcctaaacagtcaagagttcccatcctcttgtgaagagatccaaaacagtctagagttcccaccctctagcgaagagatcctaggttgtcaagagttctcaccttctggcgaagagatccaagactgtcatgagttctcaccctcctgtgaagagatccaagacagtcaagagttcccaccctctagtgaacagattgaaaacaatcaagagatccgattctttattggagattcagttgcccttagtgaagtaaaatctgaagttcctgaaactgattgttatggtgagccagatgactattctattattgaaagccaagaaacagagataagctatgattggaatttggagaatgaattaaatgagtggcaggagcatgttgattttattccattacgaatggtgaggccatcttgtatggatattgtgataaataattctcaaataagcaacgaccagtcttcatacatgcctgcaatagaatttgaaagtgaagaatatattaccaatccagatctccattacatctccccacgagaaatctctctggttgaagatcataactctgatattcatgacaatcaacctgatggtgacactgacactgctgtctcactaccaaatgtggttactcataaagaccttgactgcagtaatgatgaatttacaactggtgctgaggatcaggtagaatgtagcactactattgaacatgactgcagtaatgatgaatttacagctggtgctgaggatcaggcagaacacaacgctactattgaacatgactgcagtaatgatgaatttacagctggttctgaggatcaggtagaacccagctctactattgaacatgactgcagtaatgatgaatatagtacaactggtgctgaggatcaggtagaactcagctctactattgaacatggcccaaatcctgatggatgtctggttcatcgctcagatgatccacctgaatatgaggagaagctatcatttgcttctgtaaacattgatgagaagagacaaaccaatgtgtctactgatgaattgacatcttgggatgaatgtgatgatagttcaaagctgcattgtcctgaaaagctattatcaaccagaaaggtacaaatatcatcataaagtttatatttcacttggtttatattattgcttctcactagttggtttcgcttcaggcaatttcaccatcttctgaggaaaggctctgtaaagccgtggagtcagttgatttgaaccataaaaaattgagtaagtgccttaagtatttattctgtgagtgtgatcttgttctatcagtaacaattgcatgtttaaatctgctcagctttattttttctaactataaactcaacaatcctggaaagaaatatagatatttagaaattagattttgttgaaagaggtaaaatgtggttgaatagctatatgctacataagaagtatcatgaaataggaaagttaaaccatgatggggttggtgtcacggtcatactaatgtttgaaataagtaatatttctaactttgatccactatcttgagagttcaaatcttaatgaaataaaccaggcttttatttactgagtgaaaatactttttcttgaactctaacgagtccatctctctctatgtcaattgtcaaatgtaacttgtttctatgcaaacacctgagtttctttatttgatgtgtaatttctttttatcatacatatataatttgatttcgttgctctaaacactttgaccttttaccacatatgctttacttatattgggttaaaatgatcgcagaatgcaagggaaacctgtacttttctgagaagactgataagatgaatggtacacacgaagagcttgatgatatcacaggagcccgacttactgatatccccaacaaaattagtgttattcctaggaataaaagagtttcccatcctagaggcatttccaagattcctcattcttctcgtcatgcaaccggcatagggtgcaactctatacagagttgctcaaagagtgcaattgcatttacacagcagcagatgcatgatgcagaatgccttgccgtgagactcactaaggaattgaagtcaatgaaggacattgtggatgatatgttacgatctgaattctgtctaaatacatctttgagacataaagtaaatgaggtatgataaccacaatgcaatcccttcatgtttttggttcattatttggtcattatgtctatctgtaaagcagattctgatggctctagcttttcttttcctattttaaactgccaactgttacaaagttcttgtgatttcaattgatatatttagtgattagttaataattattgatcattaatattgattccaggcaagaatggctgttaagaatgccacaagagctgaagaagctacaaaacgatgtctggccttcatgtcaagggattgcagccgtttctgtaaaataatggtttgttcatcccctatcacttcatccgcaatcaatttttaacagtttttatggttaattactgtatgattataattaatgatcttgatcaatttcagaaattaaccgatgatggtccatctcctcaaaaacctccacaagtagtgcgtaaagagaggaagaaagtaacctttgctgatgaagcaggtggaaagctgtgccaggttaagttttatgaggatgacgcagtatctgtcagaatctaattgaaagagacaatgttgctctaataacgtaccattttctgtacaaatttccagtgccctataaattcattatattagttctttttctagaaaatagaaatatgccttatattttaactgatggtgatggttccttatgccacaaattgattcaattgatactgtgtaacaagcggagttgaatcaaaatttcaacttaggcatatatgcttgtatgtgtggaattcgagtaaacatactttagatccagaacatgtaggtgtaaaaaatatttagttctcaattttgtaaaaataaaatgtcattatcttaattgttttattatatttttttagttcgatcacgattcaatcacggttgaattattaaatcttaatcattgtctacgcgatggtacatggtcatcttatctgacttcgagacactctccatcctattggctgcaaccttcttcctatgcttccttacctcctttggcctcctcttcgtgtgtgatcaaaattcgtgaatcagagcaacgggataacctgctgcttaaaattccacattcttagaagaaaattttaatttcttttggaagaaaattaaaaattttacattttagttatttaaaattctattttaaaatttcaaaaatttaaattattcatataaaaacataaaaataataaattttaaattaaagaattttaaattatctgataaattatttttctcatttaaaattttctatccaaatatactcttaatgaatttgaatcagtcgagttttaatcataccaatagtattttattttatttaattagatataaaaaggttttattttaaaggttgtatttacagctttttaaagaagttactcaaagattttaaatatatatatatatatatatatatatatatttgctttgttttctaattaatttttcaaaagcataaacaactaaactaaaaaaaatttaagaatgtattttttctcaaaaataaatttctcaatatctaatatttcaaggaaattttattcagttcttgattttagtcttttttttaattatttatatttgcttgcattccaccaaatttaaaatacaataaagataggacagtatgttacatgtaacaaatttaattatttttctttgttcttgagagtgtttttcaaattttcaggtaaaaaatgttcattcttttattttagtataaaaatagttattataaatcaaatggatctaatttagttgattgagaatggtgtgtaagtattataaattttttaatatcgtgattaaatttttgatgtgagttcatcactatcacattattattgtgtcagccaataataatctttgcttacttttttattgttattgttagtgtcacactaatttcagatttgagatgtaaacaccatatttagggatgaacatatgtcaagtcgtcgataggggcctatgaactaactggtttgacttgtttaataaaaaagataggcattagcttttaaaaaacttatttagttaaataggttaagcttgatctcataaaaacctagtagtccagtctattacatattacacttaaatatttaatatcttaataaattaataatttcatatcataaataaaatattttttgaaataaaaaaataaattattattaaaataaattagtgtaaattgtaactttaagtttgtgaatcataaatatgtaatatgtgagggtgataatgtctggcatgctaacttttttattcctcttggttaagcttttgggaagaatatactgttattttttttttagcttgacatgaacatattaatagataaaaaatcaaaatactaaaaagaaaaatagcatttacacactattcaattgaaaaattcaatccatggatcaaatatgcaagtacactattgttgaccaccatttttgtttggctttatttatgtggaaacattacacaattaagttgttgaaaaactaatataaattgtaagtttcatttttggaaaaaaaaaatataaaatataaaatttaaatttaaatataaaataggctaatagatcacatcagattaggtccaaaaaaggtctttgatagataataggttcgacttgggctttagtttataaagtaggtcagacctatttacgcaaagcatgtcctattctcaccccccaccatattcaccaaacacatcatcttcttccccaatcttctccttcaacctaaatgccatatcctccaaacaccatagccaatagccacaaccataactatgtataatgttgtgctgcaaaactcaaatttggactgagggggctatgggatggtttgctagtgggtttgtagccattggcaacgcacaatagttgtggcattgcgcgatggtggtttgcgtgttggtggtgaatctaggtgggcatgacatggtgcaaccatttcgtcgacaatcatccagcatttgatggaagagccttgaaggcctcagatggtgtgtgttcatagtcatatcttgtccatgttggggcttgaaaagtgatggtttccctctgaagaggttcaatggagatggattcagagaaggaagattcagatagtggattaccattaataaatgctagaggaaacctctaagcatttgtcaagggttccttttgttgaactactattctaaacttctcgagatggatgagggatggaggttgatacggttgtgttaagagagctgaacgtttgttgagaggagagatatgagtttcgtcagtagactcactatctaaggaagatgaggttggaatctccttgtttttagtgaaggagactatacattccttctcaccaatctttggattggctttagtagcccttgtcttaatgcgtttgggaatgataggttctcaaagttatggagctggttggatagtcttggctcattttgaagtaggggcagctagggctataacctttctcttttggagagctatttgtacaaaccccttgtcctcttcattagtctcactcaggttcttcagcctttgtggtactgatatttcagctgctggatgcataggagtagacacattagattgctcatgtatatttttcgtcctatgctcctttgcaagtagctcctcctcttcttccctcttttgtgattgcttccttgtcttctttttcttctattgttcaaccataatcttttgtatctttttgctaatccaaaagttgttcaaggacatctactaaaagaataatcattttcttaggtatccacatctttttgggtcatttcgtgttagctataaaggtattggttatacccttcctaggttgatctctacacttggatgtcatgtatccagtcttatcacaaaaataatagacaatgatgtccttatcatgaacataacttcctatcatatccatttccagatttgtctaacaaactcctacaatatcataacaatttcttaagattttttttccattgaaaaatttggctaaagtagtttttaaggttctagtttcctcatgaagtttgacaacagcttaaggttaacccttaaattcttattctttaaaagcttatcattcaagaatcacagatcttttatgttcctcacatttcacccaaagattatgtttactcattttgaggtcttcataatctttgtgtttgtgcacatcctctcaatagatcatttctctctttgttttgataatcattgaattcattcatatcctttagatctttcattttgttttccaactcctgaaagttcttaagaagagtagcttttcccctggcagttgtctcaatttcaagtcatagcttggactttttttctttaagagtaatacaagcttcatgtgtttgagtggacttgtccagtgaaatatctacttgaccctgaaggatcttctcaagttttaaatgatctttggataaatttttgaaatcttttcacaaggtttcgtaagtttttgaaagaatagatgaattagatagaagtttatgataaacctttctaaaagactaagggtcatcgaagtttacctcatcttcttgatctgattcagattcctcaaaagttgtatttgccattagacatttgttggcttcttcattatcttcataagacgaagtgtcgtctagatcttcccaggtactcataagacccttcttttctttgttcttgtagtgtttcttcttgtcttgaaccttctccagttctgggcaatcaaatttgaagagtccaggctttttgaattcgtagcaaattatggagcttttgtctttatctttcctttctttgggaattcttcttaaggaacttttccacttggagccacctttgattttctacattttttgggatcttttgtgaaatgaaggtgagctcatctcccttggagtcttcctcaaatccatcatcaaacgaatcatcaactttaaaagctttggatgagcttctagatggagacttgttctctggacaatgatgcctttttgtccttctaactgttgacaaccaaagacttttctcttttgggcctttcgtcctgatgatgttattgttcatgtaccttgagggtactaacaagttccttaagggacatagaatcaagattctttaagctcttagcactgttacccgtgatctccactttctagacaaacttctcaaaattttgtcaatatgatcataattatcataagttttacctaaagattttagttcattgagaatggtttgaaagcgtccaaacataatttgtatgtcttcgccttcttccatagagaaaagttcatacttacgaatgatgagatcgagtttgttcctctttacttgtgatgttccttcgtatattacagcaagagtgtcccacatttgtttgacacttttgaagttgtgcaccttggtatattccttttctgaaagagcacacaacatcacattccgagccttggagttgggcaggaatctgagtttttgctcctccgtccattggcctctaggaatgtcatttagttgatcattatatggaatataatcttcattttcccccacatcccatagatctttatgaataggttcaaagtgagctatcatacgctccttccagtaatcatattttatacctttgaacagtggtggtttattggtggagaatcctgcttctatatctttgatattttgggtcttttccttagtattgtcagatactcaacccttaatggcaagctttgataccaactaaaataagaacaatcaaacttcaaaaggggttgaataatgtgtttatcaaagattactttttgtaacttttagaacaaatatagacaggaatgtctacgtatggtaagtcgtccactagagagaaaacatattttaataaagacgggtttgatcgtctagtgacttaataagaaagagtctttaaaacaggttttcaaataaatacttagtaataaaaaagtgttagagaatgctaatagaatacttaataaacccttaaggagagaaatagaaacacttggtttatactagttcaacttgcattacgtccagttctaattgcagttaagtaaaaggttcattgatcaaaatttgattacaaaacaaatattatgacctacgactattggctgtacaagtattcttaataccacttctggcactttcttagactccttatgaatctaagaaactcaaatattgtttaaaactaagtcactcctggctttcacaaacaatagtttgaatgaatacaagtatttcaataacactcattaagtgaataaacaataaagtccaatacaagataactttgattagtaaaggataaacaaatgaaaactttaaatcagtcgtctagtgatttcagtggagttttgcttaagagatattcttgttttctcgtaatgatttttttttctttttgagtagagactaccttttatagactttagtgagaaattcgttactggatcaatattgattccttgaaaagaccgttgtctcacactaggagataaggctacatgtcatgctctgatttgtacggaaatgagcgatagtacagacaaagccttgtgctctttgtcctcgacaaaagtgaccttaaaagaatattatgtgaataccttctattctcttctattatggtgtcctactagttgaccaccaaagttaacaaaacgcagtgtataacaccgattatggtaatgagtggacgctctttggttttagcaccttggacgctagtgaaataattaacagagcattttctcttgaagtgtggacgttacatgcagattatagttaaattcgttaacatattgatcatgtcctcttgtctagaacttattagaacatcaataatttgtacttattattattcatcaaaatccaagatagatgagaagagtggttgtccaaacctaacaaattggaagctggaagctgaaacactagcttattaaattagaagtattcaataaaactgacggttaaagtagctgaaaagtgtaaaatgacataaataaatatatttatattttactattttgtgttacattttttcgtgctaagtattttactattaatcttatactatttttaaaaatattttaaatcaagtttaaaataatataataaaatacacttaagtagacattatacttttattttgttaattagtttaatagttaaaataaaacatcttacataaaattattcaaaacataatagacaaaatatagtgtttaaataataaattaaatattataagtggtacaatggttaaaataaataatgtaacataaaaaatataaaatagaataccaaaaaaatctatcatcaatcattgtcaatgtcttgatttatagtgctaaaataataaaataaatagtgtaatcattaaataagaatgtaatataaaaaaatccaaaatataatataaaaataaaataaactagagtaaatttatgacctattattcatattaaataacaataaaatcctgatttattaaaaaaggataaacagaaaatttaataaatacattaagaataaaaaaaagaaaaaatatataaaaagttagaaattagagacaaacattgtccatatcatctcctttacaaaacccttccgatattaagactaactctaacacttaacaataaccctaacccctaacctatattagagtatctcaatcaaaccctaacacttaacactttccataccaatctccctaaccacacacttactctaacgctaacctatattggacattgtaactatctattatcttcacaagtgcttcccattaaagtagaccttgcgtgcaacatcatactaatcaacattaataaaataaaacatactaacaattctgccttgacagaaccttattaatactatattccaaacccttagtaattatcttctttggatttaaaacatgctactatgttaattcatttcgtatatgtaattttaaatttttaaaatttctattgtatattctcatttttattagacttcaatattatcgattttcttaattaaattccaatacataaaccttaaaccttgctttaataatataaaattattaacgaatctggacccataaaagttccctccaaacaaatactggcccaaataacaatcaaattatggggcaacaaagcctaatatactaacacatacaacttaggtatttttcaaaaagggccttgccaaaaaaaaaaaaaaaaaaactagacccgaacgaatgctacattcaaacctttcggtcttccccaactaacaacgaatgctgcatccaaaccttacgcacaaaaaaaatcagactgttcagcaactgccttcaatggattttgccatcaatgcggactcagagaacaaccaatgcattatcatcgtctaaaccacatgcatacacacttaatcaacgaatcagtgtcataaaatagaacagcctccatataactaatcaatctatcctccaccaatccaaacaatcacattcactgaagccgtcacttgcctcatcgaagcacgaaactcatctgcttcgttcaagctggtgcacgtccaaccctcacaaaacactctcaaaacctactttttgccctattatgtcgccgacgccgaaggaccaatgatttatccacaaatcatcgttaaaataaattaaaaattatgttaacaacaagcgactttgacgatacatattacgtttatattatttaataaaacttttattaataccacaaggacaaaaagtaatatacctcaccataattaaaatatttttaaatggtacaaacagttccctagaccatatgtacagttcaatataaagatcatatatctaacgatgataaaaaatttgatcacctaacacaaagaaatttacttctccactacaaccaattcggcaaaggttttggtttcttttgactatgatcacttttttagactcacatttgtcctaaatgttttatattttttcatatctcatgcctctctttcctttttttttcatctcatttatgtagtcacacacgaacaacaagaatcagatagaaaaaagaaactctaatgtatgtttttttgacatttgtgtttggtgaataatttttctttgaagttaatcatattttaaggtagaattcaatattaaatgtaagtattttttcaatggtaattcaaactataacttactctattgtgcgaaattaacctcttcaattaaactaaattgcatcaatacatgatgtattggttgacacacacacaaagccagagtagtctaagttttcatatttaatttttccaaagtgagaaaaatacattaataaatattataaatccttgattacaaaattaagaattaaaaattgtaattaaattttaattttatcatacatgaactttattttctgtttcaaatttaattgttaatcattttttatggaaaaatgttaattataagtttattatttttcgttagtgaagatgattcaaacccgcaacctctcttatttccattcaccaatcactactaaatcaatgttataactcctaaacatttaattaatagttataaatacatttttttttttaaatttcacaccttttttaagaacagtaacattcaaactaatatatggtgtggcaatggcacaaatggctaatattgaagttgtctttagattcaatgcatatagagaaacatcttatagaagtggtcaactttttaaacaagtttcaatacaatgaatcctaatatatatcttaaagagtatttcttggaagagttaaacaatgtaaataaataattttttatagaccacaagaacaaacctgaaacttctagttaaactggagcaatttcttacaagttgatccatgtgttcagtatataatgaatcttaatatttcaagcccaaagattgttttctcataagaatctcaatgtagaacaatatattgttgtggagctacttggaagggtgtcacaattgattacacacatcattgtttcatgtaaaagagtagatagatagaacactaccacacgcccaagtgtcatagacatcgtaaaggagagcaaacatgaaaaagaaactagcttcatactcgttatggagtccatcggtacattgacctggcacttgggccattgctgcaaggagtacattgttgcataaattaagtggcttaaatagaagctttctgattttggattgcatttagaatatatttcgttaagatgcgataacactggtgccattagtctcatcaaaaatccaatcatgcattctaggactaatcatatagagattaggtatcattttgttagggatcatattcacaagggtgatcgtgatataaagtttgttaatacaaactcaaaagtagttgttatcttcaccaaacctttagcaagggataggttcttccacctttgtaatgaacttggcatcctaagtgagtctaatctcacttgatccaattagggagtactcattcatgtacatatgcatttacatttgtttggttgtttgtacatgtgatttgaattcttgaacatttaacattcataaaaactatttagcatgtttaattttgcaaaaaaattgttttagcatgcatgataatcaattagcatatcctgtaatcgattatttcgagttgaggataatatctaagctctctaggtaaacctataatcgattaccatgttgggcaattaattatcttgagtgaagacaaaaagtctttctcactgtctgaacctgtaattgattaccactttgggcagtcgattacaaggcatctgaaatgtttttcgaaactgaaaagatgcttcaccctcaacctccatcaatggcagagaagaagaacaagaggatgaagtgcattgggcatagacccactatccccagatcgaagaaggagaaggaagcaacaaagggtggtccttctagtagaggaaaataggttaaatattctccctcacctaaaactcctaagaaaacaccatggttttctgaggaacactatgagtcttcttacaagttcagttatgacaagaaggagatgattcaaccaaagtacctcagtctagcttggctaaggagtgcaggttttgcatttcctgagttgattgagtaccacgagttgaagaaggtggtggagatgaaaggcacctactatactgaattggtaaaagtcttctacaccacaactcatattgatggtgatactgggttttagtgtactgctgtgaaaaggcaacagattgtgatggcaccaaaggtatggttagagattgttgggttatcgtctaacggagttatggctaaccagttgagtttcaaggaagctagaattgctttcaacaaggtcagaagaatccttctacctatgtttttgttacgaaagcaaagggaaaggaatgttttggtactagaccgttgatgctcgagtaaaaggtcttggcctaaatggttgcttggattattactcctaaggggagcaatcatgctcacttgactgaggatgatctttttcacatcagtcttatgcaacggaagctgaagataaactgtgtcaacattattgttgattgaaaacaatgatgaatacacaataaccaagagggagggtgaattggttaaaacagagtctttaaaaattctttaaaataagcagcgaatttaggatatttatcacaataagaatgctttaatcaatcaaaccactcagttcaagaatacaattactaaaaacttcacttgttgagtaataaaagatttcaccaaaagaatcacagattaagatagctagaagagattaaaagaaagtaatcaatacaagaacttatacctctcaacaagagaagctacatctagtttcttccaaccaacactaggttaaagttccactaaatcaaactctgttctttacaagcttttacaactgatcacctttatcaaacctagataaagaaatagaaatctaaaaaccgtatatactaataatgaccaagaaccatagaacactactctgttcttccctctagagaaccctactctagaaaaagctttaaagaacctctttgatctaagaacttacaataaataaaagtaaacaatcaaatcactacaagagtttaagagagatacaacctcatgatcctcagaagatgaatgaataaattttaccaaacaaacaaaggttgaatgtaagcaattcttggaatcaactctctttgaaaaactcttgacaaatcttgttcaaaccaacatgatcaatgatacatgagttctgggttttgaaagaagatcaatgtaactcagaatctcttttctcagactgtgagagcttttgtaagtaatgggtatttcgcaaaatcaagttctgtccaaaacaaaaaactcaacaactttttatagaaaacatttgtaactgaatgtaatcgattaaatcaccaaagtaatcgattaaatcttcatatgtaatcgattaaaaacaaaattaatcgattaaaatgttcttcagctttttgggaaagatttacgaacaatgtaattgattaaaacaagcttgtaatcgattaaaccagtcacgcttagttttgaaaaaagcctatgtagtcgattacgattaagtggtaatcgattaagacagtcatgcatgttttgtgtttttgtgttgtgtaatcgattacgatttgtttgtaatcgattaaagtgttcttcatggctttgaattataaggtcaagactattccttttatatatcggtataccagtaggggtggatctgagaaaaatgaatacttggcaacttatgatagaaatggtgaaatggagattatgaatttgggaaagtaaacacatctctttatagggtagatttattttgattaatccggtctttgttgagacaaaatccttttagaagataaatttctaatgatgacaaaccataaagaagcaaaccataagttatctaaacttagctaccaaaggtttctttttgtgtgttttaaaaagataagactaaattcaaaagcatgcagaaggtgtgaagcataggcctatagttgaagttttcaatacatagattgtgcatattcataagcataactaccagaaagagagttgttcagaagctggaaaggtgatgcgtaaaatgtgtacttgttaagggcaactgtaccctacacaatagtatcgtggacttgaaagtttgaatatcataccctaaagactagttgtgttcctaaataatctaaaccacataaactaaataattttgggtttttaatcttgagtttgatgattgttataagccagttcaaggaaataaaattaaagatagacaacaacttcaagaaagagatatgtatgagaaatgaaaacttggattatcatgtaccttttttcctaattcctaatttaattcagacatctcaattatcaaatgattgcctaatacctcttaatttaattttcaacctatagtcaaggtctgagaatattcttcaccataaattaatcttgtgttggtcatttgggattcaatttagggttaagaatgaacaccatagaggtttgtataaaggaggttcctaccaccagtttgatcatgcaagtcttatgaaatctatcattttacagttcagttgtctgcaagtagatggtcactaacgtgcaattgaataagaattagagtgatcaattccaatataaaataaaaagtagtagaaagacataatcatctgaataacatcgaagaaatttcattgaaaagaggaattagattacacaatacaagtgttaatagaattgataggcagattatctggaattagctgtgcagatttgttggccctttaaatcagcatatcttgcatgattctatagctgtaattgtgtaattatatccttaattagttggcccgactgtagttaccatttatagcttttcagcaaacttcaaggctagaatcagattgtatcatatgatttaaaggagaattctgcaaaggagaatagacacttttaatcccaatttctatgagtttaacatggtatcacaatatgaggcctaaaaggtttagccaaccatggtcataggaaagccaaataacatacaataatgaattgatagtaaaagagattgaaacccttgcaaattaggaccttaattcttctcagttcaattctctctctaaaactcttgaaatttgtaaaataaaacaaaaattctattcaaagtctttctgaaagctatttataatagaaaagatgcagcagttcagaaaggcacataatgaccatggtaaatccaccacagccgtggtcgaaagcattgacgttgagtgctatggggcgttatggatttgtcatggccctcatgggatgagcatgaccgttattaatttaccatggtcgtgatcgactagtaggcactaatcttgagggcagtggtgatcttgtcatggtcgttgtggttatcacaatcgtcgtaaagtaccatggtcgtggtggagtgcaacatcttcaatttcttcaatggatttgtgttgattctgtgtctttcactcgatcgaacatctatatttcttgcacacaaaactagagcccaaacttgaactctgccaggaaaagtgcatgaaaatcacaaaaattcacgcaaaaatgtcactcaacatgtggtttatcaaccacctcacacttgaacattgtttgccctcaagcaattattctaattagagatttgttgattcaagtgaagccaggcataaatgaacaaaagattaagcttcaaggttttggactttcaaacatgctcaaaggaaatgctcaaagcaaagcttgaagaatcaatttgatcaattgcaaaaggaagtatatgatttgataatccaattctgcacatcatgcattaatcattcatttaggatcattagattaattgattaagtaaaagaaattcattagaaaggcacttaggaagcaaaagtttttggaaaaataaagttgcatatttaataatcgattacaagaatagcgtcatcgattattttgttcttcgtgccctttagaaaacaaatcatgatcattgtaatcaattacatatcggtttaatcgattactaaggctttttatgcaagatacaactctctgtcttaatcgattacataaaattggtaatcgattacaagcctatacatgcagacttagaaaaatcacatcgctctgtcttaatcgattacacatcgtgataatcaattacaaaggatcacatgcataatacaagaatcacaactcactgtcttaatcgattacatatcgtattaatcgattacaaagctcatttagaaaaacatgtctgactggtttaatcgattacttcaccgaataatcaattatattgttcatagcctaaacctagaaactattaggagcattttaattgattacagtcttgatttaatcgattacaaatgataaataatcgattacaggagcgtgtttaatcgattattttcagttagaaatctgttataaatagaacccacttctttgaagtttgtaacttttgataatacgtattctgggctttcacaaacattctaagctttcattagtgagtttctctgagttctaaacacacttagcttcacaaaattcatatgggtttttgattcaagaaggtgaagcctcattcattcaaagcataaggaaaggactgcatatgtgattgtaatctgtctttcaacctgagaatcattcattgtgcattcattcttggattatcaggtgatagtgataaacacgttgtcgacacgcaccaaaacaattttactaagctaattctgtagcacagagctaacctaggtcgactcagagacacgatcaatatggttctagcttcaatttaatggtaacagtaaggggggaattttaacaaacagtttgtatgcgtaagtaaacttgcaaaaacgtaaactaaaattaaagagcaacacagaaattagcaagattatcaacaagtgagtaaaacagattagagaagcatcaatccaattcaccaaaccaagcaattcgaatcatcatcattctcagaattttatcctatcatgaacatccattcaatctcattagaagctgttcaatcgaattaacccctaatttaattgaaaccacaaccctaattgaaatatcatccaattaattctgtgattaatatttgaaattaggcatgaatccataacctaatccgctttcaatcctaaacgcattcataatcatggaaaacagaatagcaattgaagaagaagatgaacattcaaatagaattcgaaatactaaaccagaactccgattctccttgtgccttggttggttccttggattgattggtgatttagccttccatgatcatcatcaatgaaagccccatggattgagtgcacgaaaatggaagaacagaaaaacgaaaatgaagaacaatgaagaacaaggaagaacaatagagagaaaatgagagcaagggttttgatctaaaaaactaaaggaaaggaaaataaaacttgtttattgaaattgtaaagagtgtgtccaagtctcactaaagtcactaatatgtagtgactgagttctgaaaacgaaatgggccacaaacaagcccaacaatctaattatttgctaattacaaccatgaaagtcaaattcgcagcccaaaattacaagtgcagaggcgttaacttcaaagctaaaaatgaccctctaaatgacagaattggcctcgggatatttgtatcaaacttgtagatcttttcgttatctttccagggactcctagaacgctccatttggagatcggtatctccctataggtcctgcacaagtcagatacgttaagtgagcaaaaatccaaaaatacgcaacaattagtaattaagcccacttacttgcctaggcccaaaaactgaattagaatagaaaaataagggtcaaagagaggtcaaataagctaagaaggatagaaaaatattcaactaaaaaccctctatcagatagctttccttattctttgaaggtgtaatctgttctttgaatttttgtaaggattagtctattgtaattggttttcttgcaagaggagatagtgtttctctaaaagacagatgagtagtgttctcagtgtgggttttggtctctaaaggtctaataggattttagacttctgaactttatctagggttgataaatagaggcttgtaatttgcttgtaagaatattttttttttgcaatagtggaactctactctactattgagtagaagaactggatacagcctcatagggtttgaggtgaaccagtataaaaatatgtgattaatctttcttctcacctattcatctcttaattgctttgtttgtgaatcaatttcattgcacagaagattatctctgttttctatttttcttgaaaagggaagttgattgaatattgattcttggtttttagaacaatttttaagtgataaagatccttggtaaactctgattttaaaatttttaaaggggaagattcaaccaattcacccccctcttggttgttttgaggcattctattcattttcaattggcatcaagagctggttcttgtaagatattcaagatcacttttttcttttcaaaaagaaacatgaatacttctcaaataatctttaagaagggtgcctctttaaacaaacctccaatgtttgaaggggaacacttcagtttttggaaaaatagaatgaagatctttatttaatcaaatgacccaggagcatggaatgctattgagaagggtccctttattccaaagaaaactattgcaaatgagttgattcccaaagaatgggatgagatgattgaggctgaacaaagagtagtccaatatgattttaaagctaaaaatatgatcacctctgcactttcctctgatgaatttttcatgactgtgagatgcacaagtgcaaaagaaatgtgggagatgctggaaattactcatgaaggaactgagaaagttagaagatcaaggaagcatgctttgatccatgagtacaaaatgttcaagatgaattctaatgaaagcatctctcagctgcaaactagatttacacacattgtaaatcatctattgggtcttggaaaggtcttcgacactgaagagctaaacatcaaaatattgaagtgcttaagaagacattggcaaccaaaagttacagcaatcaaggagtccaaggatttgtcgaaaatgtccatggctgcattgtttggtaagcttcttgaatatgaattagaaatgtctcaattaatcttgtgaagatgcagaaaagaaaacaagaagcatagccttgaaagctgcaactttgaaagctgaaaaggaagaggaatgaagtgaagaggatgatgaggacaatgtgaacttagtggttaaaaagttcagcaaatttttgaggaaaaacaagaataagagattcaccaaaggcaacaaaaacagcaacaccaacaacaatctcaacaagaagattgacaacaacttcacatgctttgagtgtggcaaaccgggtcacatcaaatctgagtgctcaatttacttgagaaagcaacaaggtgaaagcaagatgaaaaaggaaggaaaaggaaagagggcatacatagcttgggaggacaatgagtcaacatcttcagattcttccatagaaaatgaagaagctaacatgtgtctcacctccaccatcaatgatgatgatgatgatttgctaagtgaaggagatgaggtaaattctgaacttaaccaagctattcatgcttttcaagaaatgtatgaggaagcccaaaaacttgcaaattccaataataagctcaaaggaaatcttagatgacatattgagaaaataacagacttacaaaatgagatttgcaacttgaaggaagaaaatgaaaaacttgtttcaagttacaaattgaatggatgtgtgtgtgccacttcctctagcaatgttgacaagtataaaatgcttcaaaaggattttgatgagtataagcaaagtcaaggtgaaaaatatattctgcttttagccaaaaacagtgatttgattgatctcttgagaaagttttataaaggaaaatgcaacttggctgaaatgttaagtgtgcaaaagtataccggagatacttctggtttggggtataaacatggagcaaaatcatttggaaaaacagtttttgtacctccaaaacagaagaatcaaaagtggcaaaagaactcaagagtcaacaaatattctggttttgggaaaacttcaaaatctgtcacttgcaactattgtatgaagaatgggcacacatcttttaaatgctatgctaggagattctatgtgcctaatggtgattgcatttggattcccaaagtcaaaagaaatgctaacccctatggacccaaccttgagtgggtaccttctattaaaatctgatttgcttttgtaagtgtgtctaagagctaggacatcaacttggtatcttgacagtggatgctctagacacatgactggagacatgtcccttctctcaaatctgactttaaaagaaggaggatatgtcacttatggtgataacaacaaagggaagatcattggtgaagacaatattggagacaacattaaggcaaagatcaaaaatatgctgtatgtagatggactaaagcacaatttatcgagcataagtcagctgtgtgataaagactttaaagttaacttcaacaaggattgttgcataatttcagatgagaaaagtggtgaggtattgcatataggtaaaaagaaaggtaatatatatatgtgctttcaattgaccatgcattatttcataaatcttcttgcctaataagtaaagttgatgaaacttggctgtggcataaaagagcaagtcacataaacatgcatcacatgaacaagctcattagaaaggatttagttattgggttacccaaactcaaatttgagaaggacaaactttgtgatgcttgtcaaaaggggaaacaaacaaagaactcttttaaaagcaaaaacattgtttccacctctagaccacttgaactacttcacattgatttgtttggtccttcaagaactatgagtttaggtggcaactattgtggacttgtgattatagatgattattctagatacacttggactttgtttttgaaatccaaaagtgatgctttccttgcttttagaaaaatggccaagcttacttaaaatgagaaaggatataaaattgtttcaataagaagtgaccatggtggtgaattccaaaatgaacattttgaaaaattctgtgagaaaaatggaattaaccataatttttcagctccaagaacactccaacaaaatggtgttgtggagagaaaaaatagatctcttgagaaattgagcccaagaacattgatcaagccttgagtgatgaacattggatgcatgccatgcatgaagagctcaatcaatttaagaggaatgaagtttgggaacttgttcctagaccttcatctcttaaacctattggcacaaaatgggtttttagaaataagcttgatgagagtggaatcatagtcagaaataaaactagattggttgctaaaggctataaccaagagaaaggcatagactatgaggaaacttttgctccagttgcaagattggaagcaatcaggttattacttgcatatacatgcctcatggatttcaaattttttcaaatagatgttaaaagtgtctttttaaatggatacattgaggaggacatatatgttgaacaacctcctggttttgaagattttaaacatccaaattatgtttacaaactgaaaaaggcactttatggtttgaaacaagctccaaggcaatggtatgagaggttaagcaaatttctgcttgaacaatcttttacaaggggcaatgttgataaaactttgtttatcaaaaggcttggaaatgatttcttgtttgttcaaatttatgtggatgatattatatttggttctactaaccacaagttatgcaaggatttttcatcagctatgcagaaagaatttgaaatgtcaatgatgggtgaacttacattcttccttggacttcaagtaaatcaaatgaagaatggagcctttcttaatcaatccaagtactgtcttgagatcattaagaaatatgagatggagaagagcaaggatgctgcaacaccccgtaggcctccgacgtgttatcattaataatatcagagtagcgcttaaaacacagtttataaaactcagcagaagcatagaatcgtttttcttgatccattatgtatggaatcacaacaataaccaataaaacacaaatcataacatatatcacgcccctgctgatccagtttctcataacataaaccatccagacagatatctaaaaaaaacttaggcagattatcactatacaacaattatactcagggaaaagtcttatatcatcacacaatagttctgtacataactatctacatcagcccttctcaagggtccacagaactatacatcataaacaaaatcaaaatagagccttcaagctctccatgccgctcctcagttaagcagcctagtctctgctgggcctcttgccctgagactgatcttctcttctagagtggtcacctgaaatcatagaaaaccccacacggggtgagataacatatctcagtaagctcagggttcttgggaaatcattcccaccctggctcacagattcacaacacacatatcaggcaaacatctcaaacatggcccattagcctggccctctggccctcaatacaacatggagcagccatctgctcaatactagtggcagagaaccctctatgccttggcagagaaccctcaatgccgttccacatggcagagaaccctcaatgcctggcagagaaccctcaatgcctaaatacaggacagaggaccctcaatgcctgtatttatctattggccaacaaatctatctcaatcacagcatacattcatccaatacagatgcacacaagatcaatataaacaatgtcatagccaatgcatgcatcatgaatcataaccaacactccccaagagtgtggtgtgcaaccaaaatggtaattcatccccaaagaacactgaacttacctggtaaggtctcagtctgcggttccttcctaggtctgtggctcccgccaccaacagtctcagaatcaaagcctaatcaaggcacatgcaattctcatatcaaaataagccctcaggcatccaattcatagaacatatattatatcagaattcccttatcctagggttcagttacactcagcccctcacaaggctgtttacaaaccattcaaggtccctcaaggctgaaagctaagcctctgagtcatctggactcaaaacacaacatacatggcatagtttcctcagccttaacctcaattatcactagaacagactgagttccactcaaagtcttgttcaactagccacttggctcagcacaacacaatcaaggctctagtctatcaaagaaccatcaacaagtgactctacacaagtcacacaggcatatacagagccaagattcaaagtcatcagaatcaaaaattgaaagctaatccttcatctattcctcgctctaaacaagtttctctacaggaccctgggctaattctagccccagctcatatgggtcattattcatggaaacccccaggatcaaaattaaacggagaaacttgagtatcttacctcagtggcgactcaaaagacctcaggacagcttcctcgagcttccgtgtcctaatcacaccgtgggtcctcgccaaactcaagttctctgagcttttcctctgaggttccacttctcacataaaaggggtttttcaagagtagaattgaaggattcaagctttctaatctattctatcacaaacaaaggtcatcaggaagtgtttgagctagtatctaaggtccctaaaagcttggaaggtcatcaatggaggtttggaggtccaaggaagaagaaaggctgatttttcctctccctttcgggtttttggccttaaatactacccctgaccgacatgcggcgcccttggcgctgatggcgccagcttccagtgcatctggcgcccttggcgccagtccggcgctcctagcgccaacttccaacatctgtggcgctcttggcgccactctggcgctcttggcgccagttttcagcacctgtggagctcctggcgccactctggcgctcctggcgccactctggcgctcctgacgccaacttccagcaccggtggcgctcctggcgccacaccggcgctcctggcgccaacttccagcaccggtggcgctcctggtgccacaccggcgctcctagcgccacatgtagaattagcctatgtacccccggtagtacataggcttgttggctcgataccttctattcggcttaattctgctattttcacctgctaaccatcaattctagactaaaacacctcatgaaggcatagaaatgagggtccttacacacatcaacatatcttgattcagatgaaagtggaaagaaagttgatgagtcaaagtacagaggaatgattggatcattgttgtatttgacagctagcagacctgatataatgcttagtgtctatttgtgtgctagatatcaagctaatcctaaagaatcacaccttacaactgtcaagagaattctgaaatatctcaaagctactccaaaagttggtctttggtatccaaaaggtgcttctttaaatattattggttattctgattctgattttgctagttgcaaattagataggaaaagcacaagtggcacttgtcatttgcttggaagttcattaatctcatgacattgcaagaagcaatcttgtgtggcattatccactgctgaagctgaatacatctcagctggaagttgttgtgcacaaagcttgcggcttaaacaacaaatgctggattatggagtggaactgaatgctatacctctgctatgtgacaatacaagtgctatcaacatatcaaagaatccaataatgcactctagaacaaagcatattgagataagacatcatttcctcaaggatcaagttcaaaaaggtaacataaaggtagaattcattgacaccaatcatcaactagctgatatattcacaaaaccattatctagagatagattttatacacttagaaacatgctagggattcttggtgaaagaaacattatctagcttgattatatgtgtctatgtgatgattgaaagcctaaatgtcactaaatgcttaagtatatttatcattgtcaaaaagctgctaaaatgctctgtatatgatattttatctgtagtaatcgattacaccacaggttaatctattaaattcattaaaaatcaagtctgaaacaaaatttgcatacatgtaattgattacattagaatggaaattgattattcttcacataaccataaatcacttttctctggaataatcaattacgtatcgggataatcgattacaatgttctaaattcaaaaaacttcaagcatgtctctctggagtaatcgattacttattagctgtaatcaattaccattcatattgcaataatgctcactctgtgataatcgattaccactcagaataatcaattacctatggccttgatacttagataactgattcaagctgtaaaataatcgattatttaagcaaagaatcgattataggtcatcttcaacctctaatcaagagtaaaataattgattatgtatgaaaataatcgattacctcgtgtttgtaggaagcctaattgaattggaataatcgattacattacgaaatattcgattattcatgttgttgtctgaaatctaacatgtttttatggttaattaaactgcccaatccgttttaaaaccaacactcaatgtcattaaaccgtcccaactgctataatttttaaatttgtgaacgttaggagcccaatctttgcttataaatagtgatccaaaggcttggtgcactacacctaaccatttctgtccttctgcatattcttctgcacttacttattttctctgtgtctaaaattctgtctaagcctacctgagaaacatgtctgagcctgcttccaaaagaattaggaaaccaaagagaagacatggtgaatcctcttctcaacctcaacctcaacctgaacctcaaccacaacctattgataggcttgatatctggttctcgtctgagacagataaaatcaattacctccaattcaatgctactaagcctgtgtccaccccaaaatacatagaattagactggtttattaggcaaggattccaattaccagcctatctagagtcacaaagccttaggaggtttctagagatgaagggtaccttctaccctgatctagttcgaggtttttacacctgcttgaagggttcaatgcagggtgacatgaggtccaaggtaaaaggggtaaccatgcacatcacctctgcaatttgggaatcagtgggtggaattgtttgtgagggagctcgcagatttgatgaagatcctgatgggtacagtaagatggatacctacaggagcatgcttcatgacccacacatgaggcttaggaccaggcttggcacaagtccaatgacagcagaagataggatgctgcactatctaatcacatacatcatcaccccaagggcaaccaaccatgcctaagaacctgatgaagatcttcagttggtatatgggttgaagaaccatattcccatgaattgggctctgatctttgaagagattattgtaatatcttgaattttaagcataggattaagcttgtgattaagaaacataacccaagcattagagttcctaagaaggaacttcagtttgaggcatggtgcgattagcgccataaaccgcgcggttggcgccataagatgtgaggggcgcgaatagcgccatttaccgcgcgggtcgcgcgggaagtgccctggaaatgcaaattcctcgggtttttcacgcggttggcgccaatagtggtgcgggtggcgcggttggcgcccgttggcgcgatcagcgccagaggtggtgcgatccgcgcgggacccacgggtaggcttaaatatagctctttttggacgaaaatgagagagaaaagagaggaagagagagagaacgaccattgatgaactttggagcttcatatcttctccatctttcatctaaacacctctgacccaactgagaaagtgttcagagcctcgagataagctagagacccagctttattctcgacaagaggcgataaacggcgagatcgcgatttctaaggaagtccttggaatcgaagaatcagaggtgagggaagatttgattggacgatctaccttagggaaagtgatttcctggtgtgtctggactacacagaggtaagaaactcgagccttagccgttgattctgtgtttgggtttttagttggttttgaataccttaagaggtgttagagtcgttattaggcttggactctgtagagttttgtgttcagagggttattctgaggaagttagagccttgaatcatcattattgatgaagtttgattttggctttgggtatgtatgagcagagaaaaaaggctgattatttggctagtgtgaaccttagagcagttgacaaagttgctcatgagatagaaaagatgttgtttgtgagttgaaattggtaataatgagaagcttgaatcgagaaggctaaagcagagatatgctttatgttagcctgatcagagtctcagaagaggctttggagccttgtgtaggctgagtaggatccttctgaagtgattgttatgggttaagtggaaggaattgtagtttcctttcgatctaatggcttaggaccgttactgatacactgtgtgtttggtttctgtaggacgtgagcttgatagttctagtggtggtgaccacgaggccgggagagccggcattttgcctggagcaggtaagctcttggttcttgtttgtgcatcctttactgtgttccaccatgatcctgatagggtgatggttctatgtgatgatatacatatatgtggagattgtgtattgtatgactgattgctgaatgttgtgctgtaccctgtaaaagggaaattgatgagcattgatatgtgatgcttgttctatgagttacaccctgagattgggtggttgatatgtatggctatggtttgcctagcttatgacctgcatggttgattgttgtatcctattgtagtaggatagatgacatgtgattgagtaagacctgatgtgagatgttttctgtgatatagacgtagcctcccgaatggagatgttcctatatctacagacgtagcctcctcaggcaattgtattgagataggataggagatgttcctgcgatatagatgtagcctcctggtggagatgttcctatatcagcagatgtagcctccttataaagagatgttcccgttatatagatgtagcttctaggtggagatgttcctatatatacggatgtagcctctgatagatgcattgagatcctgccatgagatgttcctagtatatagatgtagcctcctggttagagatgttcctatatacatagatgtagcctctgcgggacagtgatagatgtgatgcatggctgtatgccatgagtatagcctgattttgaccggtgtatatgcattgatgtgcatgatgattgattgagtgattcactgctgttgatactgatgatttgatatactattttcatgtatatgtatgaaagtgaaccaggggaaggaaataccttcaagggccttgagtttactgggattttatatctcaccccttgtgtggggcttatgttttgcaggtgattcctcaggaggagccgatagatcccaaggcaagaagcctgtgcaaggatagctgtgttttgaaaccttaggcatagatgccatgagcttgtggctctgatgttttgtatttttgcctttggttggttttgttgtaccctgaggggatatatttgcacagttttgtacttaaacagagattttatgtatattcaccatattataatgtatagtgtatatgatagtgacctttgatgacgtcactcttagtttatgcttccaaactgcttaaactctgatgattatatgtgtggttgttgattaatgtttggtaatgaccctgatgattaagatggggcgttacaattatgctgaaatcaaaaaggttggttaactacccattctcctatcctgtttttgtttcaaggctcatagatcatttcaacatagatgttgaaaatgaagttgtagacaacactctctcctacaacagtcaaattaaggagaaacatctaaccaagatgggcatgaggaaggcacccaatggctgggtaatggctgcccaaattggtgctgctgagcaaggggagatggctgcagattctgaggatgaaggacaacaagaacaaccacaacaaccccagcaagctttctcagattttgaatcacttatgattcaaaagatggattctcttttgaagctacaagaggacttaaaggctgaaactcatgaagccttagaagatattagggaaaggctggaggctattgaaactaacatggatgatagagcctctgcagaattctaggatttttagtttatgttttttcttagtttatatttagttatatttctggttgtaatagacaatgttatgttctgttttattttataatttgctttatgtactgcctcatatggtaatcctatcaatacattatgcaattccagtttaaaatccgctgtgcttgctttatttttgacttttaacaagccaaatagggggagaattgattaagggggagtagtttgatatgtactctgttcatccctattttttgattcaatttttgcccagaaattgatttgaatgaatgctggaatttagggggagttaatgtgaaaaactgaacataatacaatggtataatgcttaattgaatgccccatgagcaaacatgtgctttaacacttatttttggcaagattgtttgaaagttttcaagtttataaagcttgttcaaatagtggcttttcaaattgatctccaagtacttatgcttaatcaaatggaagatttggcatgtttaaagccaaaaaggggaagattgttgattcaagtgaagctaagcataaatgaacaaaagatcaagcttcaaggttttggactttcaaacatgctcaaaggaaagcttgaagaatcaatttgatcaattgtaaaaggaagtatatgatctgataatccaattgtgcacatcatgcattaatcattcatttaggatcattagattaattgattaagtaaaagaaattcattagaaaggcacttaggaagcaaagtttttggaaaaataaagttacatatttaataatcgattacatgaatagcgtcatcgattattttgttcttcgtgccctttagaaaacaaatcatgatcattgtaatcgattacatatcagtttaatcgattactaaggctttttatgcaagatacaactctctgtcttaatcgattacataaaattggtaatcgattacaagcctatacatgcagacttagaaaaatcacatcgctctgtcttaatcgattacacatcgtgataatcaattacaaaggatcacatgcataatacaagaatcacaactcactgtcttaatcgattacatatcgtattaatcgattataaagctcatttagaaaaacatgtttgactggtttaatcgattacttcacggaataatcgattatattgttcatagcctaaacctagaaactattaggagcattttaattgattacagtcttgatttaatcgattacaaatgataaataatcgattacaggagcgtgtttaatcgattattttcagttagaaatctgttataaatagaacccacttctctgaagtttgtaacttttgataatacgtattctgggctttcacaaacattctgagctttcattagtgagtttctctgagttctaaacacacttagcttcacaaaattcatatgggtttttgattcaagaaggtgaagcctcattcattcaaagcataaggaaaggactgcatatgtgattgtaatctgtctttcaacctgagaatcattcattgtgcattcattcttggattatcaggtgatagctttccttattctttgaaggtgtaatctgttctttgaatttttgtaaggattagtctattgtaattggttttcttgcaagaggagatagtgtttctctaaaagacagatgagtagtgttctcagtgtgggttttggtctctaaaggtctaatagggttttagacttctaaactttatctggggttgataaatagaggcttgtaatttgcttgtaagaatattttttttttgcaatagtgggactctactctattgttgagtagaagaactggatacagcctcatagggtttgaggtgaaccagtataaaaatatgtgactaatctttcttctcacctattcatctcttaattgctttgtttgtgaatcaatttcattgcacagaagattatctctgttttctatttttcttgaaaagggaagttgattgaatattgattcttggtttttagaacaatttttaagtgataaagatccttggtaaactctgattttaaaatttttaaaggggaagattcaaccaatttaccccccttcttggttattttgaggtattctattcattttcaagattaacaactttctacgatatcaagaaagcatagttagcccctcatattattacaaacaaaaaataaaagaattgagaaattcaaacaaccacattcacaagatatatcctagagaattccattaggctttcaatgcctgctattagggttttatttcacgttagattcaacttataggccaagtataacccaatcatgataaagtaagtgtattattgtccaagtcgtctcccaaagtaataaagaggggatttcatgtaagtatttaactaagaactaggtttttgtatttttattttttgtttgtcactaaataaataacataaaataaattgcaataaaaattaaatgaaaagaaaataattaagtaaagatagaaatactagacttggatggtgacatcgatcttgatgaatgaatgtctaggtttggacttagaattcgctcgatccactgtaacttcacaattctctactcctctttcttgctcatccctgattcacttatgtatttttccccagctcctgcatggtcatagattctaaactacttgcccgatacccaatgccttcgacatactagtacaagcaatcaacattaatggtcaagaattagcgagacttaaccaagattattttattcatagagataatcccaattaagtacttgattcatatttgggtttcaacaaggcttgccaaagcgcaagtcaattcctgaactcatctataagatgatcaatcaaataatagcattaagtacaaaaataaataaagaactcaaaatgaagtattgaattgatagaattaaaacgaaacaaggttcgtactttcctctcctagatgaaaggaattgcactcataaaaataatataatgaaacctagagtgcctaatggaataatggaggtatctagtaggtggaagtctaaaatataattctaagaattgttcaggaattctacacgttacaatgaatgtctagcctcctatttatacaattgtagctagatttaattaaggagataatcacaataaattacaaacaaataatatctctaattaattcaagtaattatcttcttctttagtttatttatccttgaaatatatcttgcttttgttcctagcttatatcttcaattttcacaatttctccttccagaaccttctgctgagtttgggcctttggagctcttgccaaaatgacctgtttttgctgaaaaaatatcaaaaaattcattaaaaataactaaaatataaaattctaccttagacaaagtaaaaattgaatttaaagctaatttgattcaaaacaaggcctaaagataactaaaatgtcaaataaatgtcacaaaatgcatttgaaaatccgataaatttgatgtttatcaagcttacgattcaatggatgtagacttaaccatataagtagtaaagtttgatagaatactaagtgagggtaaagccctgagaaacaaatgaacgataaagtgttcgggtagaagagtctaaccaaattgtagattccttagagcactcattgagatattatgtccccccatttaagttcccttctttttaggaaacacgtgaagactcgtgttgtggagcatgaagtcttgttatggagaacatagtctagttatgtcttatgattatatgtaatttcttttataagatgtatgagagctttgttacaagggaggatttgtatctatcaatattataattcagttgtaatttgtacatttatttgttagcttccgcatgataatgtcgcataatttttttttttataaatgtaatttgtataactattataatatttgttagaaaataagcataattacagtaataccattagggtgttaaaacaccagatataaattactaagcaataaacgacataaaacacatgctggcaaaagtgaattgacgtgcaaaggtgaattaaaattgcaaaaccaaatgtgtatatagaaaagtgacgcacataaggaaatgtaagcactaactcaaattggaagaaattgatgaaagcaaatcaaggaataagggtgcgcaaaaacaagacaaaaggcatcaaaagaaagcaaaaccttaattgaattcacgatgttgaacacactagttggacatgtccacatctaataaccataaaattctagtgtgcaaacaaccactaatttgatgcttgaaattggctctaatacaaaatgattaccctaatgagtatccaattttagcatcatcaaatttggggggggggggggggaggtgttgttaaataaaggaaaagggaaaaaaattgatcaagacaagaagtggaagcataacaccacaactcaaatgaattgatgagttaaggtagatctgccacaaaaaaatggaattctatgatgagaactaagaatccaaggatgaaccaaagagaagcactatcactattaacaacaagttgaaatttcaattattcagcaaaaggtccccacaatgtgtaagaggtatatttattcctctcactaaaataagcacttgggccaaggcccaaaactaacacactaaagtaatataccaaagtaactaaaataaagttaataaacacacatgatttcaattacaaaattattaaagtccaacaaaggtttttataaacaactactaatcaaagagttgtctaaaatttattatcttcaaggctcctccctcttccttctctataagtgagttcatcttcacattaatgtcctcttgtagcttcctcaacctttatctaataacaactcctcccaagctaaggtccttatccttttgtagtccttcatcactagtagttgatttcaccgagctcttgccaaaaaatgtctccagacaagtgtcattgaccactgatagcgtgccatcattccaccaagcctcctctgccttgctcctatttttccatttgccttgttacctacactatgttcacaaaggttcctactgggctcaaaaagttagtaaattcatcctcaaaccacaaataaagaggtgccccatataccctgatccaaaccaatctgctaccaaggaccacgtttggctgtcatggagagatggattcaaactaggtacatagttgttctttgctcttcccattcccttccccgatgtcttcatccatttcccctgatagaaataccatggtgttgtaacaccccaagttttgagtactaggaatatatcataaggagaactcttatttgaacccttctattatatattctgtaaacatttgttattatatttgtatattattggttttgtccaaagcatgtacttgtattgtgatagtgtgtgtgtgtgtgtgcgcgctcctatgcacgtgtattttttgtatattattatcattgttgttgtctttattatattatatttggtgttagaagactattagattaacttcttatagttaaaatgcttgaaaagttatctaagtctagtgttaactttatgataataaccctagaaagatcacgtcatatcttgagttatagttgtctgtttgaggtgttgttcacgtcttagagaaaatcatctacaaaataggtcacttgatcactaaaaacgctctaagtcccacattaggcaaaataacctcatgaaaccctttcttctcatatatatatttacaaccaacaaaccttatatgcaccaaagaattaagtagcttagcattaggtgcagagcccttcatagtcaatatttttatattttcctttgagttttcaaactcggggaatttagacgacttgatattgtgttttaaatcacaaccaagtttttgccatagtaaaagttgttgtggagatcgtggtggacgaagccattggatcaatgtgcttttgggaatggttgcgagatctttcttttccttgttgtggaattgcttcatttgaggttaggggagtaggttctctctttttctttttttgtatgagtggtatgagccacgagtagattgtacaatcttaggtttatgattatagcaagtttattttcttggatagattgtgaatactgtaaagcacattgttttgttacgatttgggtgaattttattgtttgatgtttttccattttgattttcttgaaattgaatttgataattgatgtaggacgcatgtcttgattttctgatagaaaacattaacttagaacaccaaaacatgtacttaaatgatagaattagaattttttcgtcatacgagttgtagctttgggtgttatgaagctaagggatttgatttcactcaaaaaaaatatttatataactccagatattgcaattttagtgagtaaaggttaagttgtcagaattatgtgattagtttgtatatttcctaaatttaggttttcaaatgattgaaagggattttgagttcaacataaaagttgtggataattgtcgtatctttctaaggatataagaaccaacttaataggattagaacaaatctagacatgattattatactctatgaaggtaatagtaacgtaggatgaaaaatgagtgtgtgtgtgtgtaatattgatatcataatgagtgattgtataatgcatgacgtttatacttatgatttgacgaatgaagtgatgttatgatattgttgtgtaaatgagttaatgtgtccatgactgatattgtgactgaatgaatgatgtccacaagtatatgtgaaagtaatatgttatggtatgcatatgtgttgagaaaaatgttaggagaatgtaatccttgtgggataggaatctccaagggaattcgaaaataaaccatgtgcatattgtctatgaaccatgcgtcatattgtgcatatgtgttttgaagtgaaggacacttgtgaacctaaccggggaggtcaggaaagtgttaacgtatgactttgaccttgggggtgcaacggtttagaatctaatttaagctcatgctgataacatgtgttgaagtatccttgcatggctggaacaccctaccatgccgccaacaatgtcatctcagtgagagtgatagtgtcaggtttcccattgtgtggcaattcattgactacatggacttttgggctacattcacagtgttttccaaaatggtatcacatgcatacgagtctagggtttaatgtgcattgcatttcatatgttactttgtgtatggaatgtttaatttggatgaggcatggttgtgttgtggaacgtaattgtttataaatgtatcttatatctttatgacttccttaaagttttaaatttaacatgaaatgtatctcactctccatctgtttgtcttgtttgtgttgagactaaatgtcacccttgcaggtgagtctttgtaaggttatgatgaagatgttaacatcagaaacttaggtttctactttatattactattaattttaagattatgggtgctcagaaacaatgtaacattgggacgcaaattttattcatttatctaagaattaaattaatgagtagtttttcaccacttttacttaatatggtttgtatggactttggaacaccaatttttttaacatggagttacatttttaattgatatgttttctttaagtttacaaatattttgcatgtaatacacttaccacgaaataagttttttttttttttaaagttgatatattcatttaattaaatttcactgcaaatatattaagagaacattagaagtgtatttgtcttggggtagaagagtgttacaattttccctattgatctaattctgattggggagaagccattaaggaaaaatgcttcttaaatagatgatggtgaatcctcttccttacagatacccacataacagttttttagccatccttcatttgttctttaaatcttgactacatcaccctcttgtttcctcataaacctcatgtcttccatggataagtacaaagcttgtagaggaaacttgcaaaggaaattgaaaagagaaactgaaaatagaaaggaatgaatagcctgaattgattacctgcaaagttggttattacaacatattatataattagttgctagagtaactaactcataactaattaactataactaactgaattaactctagttacatagaaactaaccaactaagctaactctagttacacaaagcttcatgctaagagcccccctcaagctaggaatggataaccgacactcctagcttggaatacaagaattaaatagcaccagggatgacaggcttggtgcaaatgtctgcagttgatttccagaagagataggaaaaagtttcacaaggacattcatcatcttctcatgaactatgtggcaatcaatttttttatgtgttttttcctttcatgaaaaacaggattcacagcaatatgaagaattgatttatcatcacaatgcaatatagtaggatgttggaaatcaagtttaaactcttccagcaattagcaaataagtaagccattgtagctcacaagtggtactagctagggcccgatattcaacttcagaagaacttttggacacaatagcttgctttttagattctcaagaaaccaatgaattgccaagatacacagcatagccagtaatagatctactagtataaaaacattcaacccaatttgaatcactaaaaccttttaaatgaatgttcctagca
